United States Patent Application Publication US 2022/0167576 A1 - sequence listing, part 17

SEQ ID NO: 30 - DNA, 35937250 bp, Oryza sativa (residues 33,823,297-35,937,250 of 35,937,250)
  misc_feature (5969519)..(5970518): n is a, c, g, or t
  misc_feature (13681864)..(13682863): n is a, c, g, or t
  misc_feature (13684155)..(13684254): n is a, c, g, or t
  misc_feature (18795366)..(18796365): n is a, c, g, or t
  misc_feature (24815509)..(24816508): n is a, c, g, or t
  misc_feature (35936251)..(35937250): n is a, c, g, or t
tgctatgatgatttttcctacaattttcagcctatataccatataattatgaatatgaagggacttgcaaatattttttgatttaaaattaaaaatatctaaatcaccgtcatgtgatagaaaatcagatctttatgaaagtggctaacctgaattttatgtcctttgaacaatggatgtttcaatgatggttgtagattcacatcgacacaatcatatatgtctccatcttctacctactttaatgtttctctgtgcttgttagccatcaaaggatcactaaatgtatctcggaaaaaggtatacttgctaatacctgaatagtcttattaacttgtaaagttgtcaggattcgactagtattttctccattgttaatgggtttgagctcttctcccctagtagttagaacaagatatgacaagaggagagccagttgagaaacattgtttcctttcatggtggaaatcttgagtggtttgtttcatagcatttagaccattatataggaaaggtttcactggctatcatttaagatgtaatacattacaattaatgacagatgtacaatacatttattacatagaacaatcccagtattaattgcacaagatatggtagagtaagagccatctcatatttgcacaggcatgactacttccacctaattagtattatataaatgtataaatgaccttcctgcctaaacatgttaaaaacaagacctcatttattgataagattggtagcattaagcgaagaaaataggggaaagtcgtcttgaagttctacaacaaccaacaaacttatatgggtttcctacaaccctgcgttatggatgctcccaagcttggctccgacaagccagcttcttggtcatggaaaatgggagctaccggttagacagttggaggagcctcctctacagttatcatactcctacctctgccaacaacacatcaatggcagaaggaatatgctagctatgtgttattaagttccatttgcttctttgggacaatgagcatctcttcattttaactattacaagaaatcatgattattgaagaaacaagaggatgcatgcattgtgttgtcatgccatgtatgtaacctttaatcccattatttccaacacaaaagattatgttgttacagtttgcaaagcacataacaccatttagctatacttgcctgggccaccatagtatacatgcataccattatcattaagtccataaccatcatagctgtataattttggatcactagaaaaaggatcagaatcacgaatgtttggagtaaccagcttgttattcttgtcttcaataacttgaatattcctaataaaagttgttttgccaaatccttcagaagcgaaatggccacttcccatttgtggagggtctgaagcagctatcggaccttgaacatatccaccccaaaatgcataatcacctttggctttgaggtaagagaattgtgaacttggccagtatccgattggtgtattgtttgaaccatatgccaaccaccagttttcagtctttggatcctaaaacatgtcaagattagacaacaaatacttaatgcaaattctaaagtaatatttggcattgaatattgatatgtttgtgtaatcaaactaaaaaactgtaattaattcgtcttgatttgaactagtttggactagttttatttatgtggtcattgtaatcatactaatttcaaaaggaaattaatatagtttagattgttcttactcgacttattattgatatatcaagtctacatatatagtcaaacctgagtttccatgttgatcgagcacaaatatcgtacaattctcaatctgggcatgcattatgttacaattctcaatctgggtatgcaattatgtaatttatcttattttaatgaaactataacatcaaagttcctttttaataaattaattttctttacatgcactaagataaaatatttggctaggagatgatagggaagggaattgctataaaaactatgagttgcttagtttttaataaattaattttctttacatgcactaagataaaatatttggctaggagatgatagggaaggggattgctataaaaactatgagttgcttagtttttgaaaaacaaaaaaaatagcaataataaattacataaattgcacgattagacatagaacctatataaccaatcatacaaaatttaagaatataataacaccttaaaaataagaacatttattacatattgtggtccattatagatagagatgggatggattcttcctccaagaccaacattgcgactaacttacacgaaaccaggacaattgtgatcaacgcagccttttttcagttcttcattatcctgtcataaatatttattccagggtcaataaggaatcaaaacgaattatatttataatatctgagttggctaatttacatggtccatcatagattctttctggcccatcatatgccttacccagaatatatggaacctagcaaagttatcaccactaaggcttggagacacacaagacccaacacctatcccaactccaaccgcagcttttggcaagttactaatttgtatccatgatgcagtaaggtcctgactatctttcttcacctttgggtcgtagacatatattgatccccgtattccgtatacctcatcccagtattcaattccggccccctacaagcaaaaataatcatttattcttgcaaataaaaataacaataattgcaaagaccaaatgatcaagttgaatgttccatcggcatatccagtgcaagtaagacaatgtggggcctgggtttgtagtcattcccgtgttggatattatcttccaatttatgcatgtttcaatgctactagacagatttcacacatcataaatacatatatataattctaatgagttattacatagaaatttcattcacttagtgctatcgactagcaccaacgtggataaaccttcccaagaagtattagtaattgggtacaataaactgatttcaaatccctttagtattattgaaatattattcatttgatcgaatatcttgttaaaaaaccatcaaagtttcaaatttaaaactagttacttatttcttaaaattgagagagttttttttggggggggggatctctctgaatgtcttgttttatttataattgttcttacagtgggaacattgcgcatatcttgtcttactatatctctcgccgagaattttgatgtcagcactgaaagattgatttgaaaatgatcatacgttgtaattaggttatgaacagggacactagttgtgctgttaaatgccatatgcaattcatgggacagttccatacaaaagtctatattgtcacagtcagcctttcgttagtatatagttcaagcatttaactaaaaaaacttaccagcattcgtgactcattgctagccaactcgccaattcgttgtagaattgtgttgtccatgttgttgttgtgcagtatcggaattgttcctataggacagtcgaaggtagacagatgtgcttgcaagactgcaccttctaatggcgatttaatatccaaccctactggaaaagagcttggttccatctatttgacatgtaaaactttatcaccatataataaatgattcgcaacgcacgactacttaaatagatatctacctaacaaagtgctccaatgattccaaagtgcagtttctgcgtgtatatattatgggccatatatacaaaaaagaagtcataattttccttttttatgttaaggcaaaaagtgtagggagtgcataaaggttgattcttagaacaatctagaagcaagctatggcctaccatgaatacaaaccaatagaaagaattttgctatgatgagtttgcctacagttttcagcctacgcagtatgtatcatataatcatgaatatgaaagaacctaaaaatattgttttttgcatttaaacttaaaaaaaataaattgacccaccatatgaaagcaaatctcatgtttatgaaagtggcttacctgaattttatggtctttgaacaccggatgtttaaatgttgtctgtagattcacatcaacacaatcatatatgtctccatcttgtgcctactttgatttttgagtaaatcgtattagctgtatatgaatttgttaggtgggtgtaatctagtgcatgaactcgtaaaacattcattttggtaaatgaactaggtgcgtgcgaacgaaggccaaaagaacataacaagactattcttgctaatttaagtattgattagaatgctacataaatatgtacttgagaagaatgctacataaacatgcatattttcactaaaatggtttaataaggcctataacgattgcacggagaatgatataaaaaaaccgagaaatgatacaaggggtagaacaaagaataataaagtataaaccaagtttacaaatatagtatgtttcatgctcacctcacgtgtgcacgtcctatcctaaccagcatctaacttgatagaattggccatgacatgtccttttggtcttagtttgcacccatccaacaagttcatacaccaaaacaagtattttacaagttcatgtagtaaattgcacatacctgataagtttgtatatcaccaatataatttactcttgatatttcctcttgtttgtcatcaaggatgccaaatatacaacccctcccccccccccccccaaactcagaaagaaagaaagaaagaaaaagaattatttctcatacctgaatagtgatattaacttgtggacttgtgaggctttcattagctttttctctactgtttatagatttgagctcttttcctccaatagttagaagaagatatgacaagaggagagtcacttgaaaaacattgtttgctttcattttggtaatcttgagtggtctatttcatagcattagaccattgtatatataggtttagaggttccgctagttttcacttaagagatactatattggaattaatggcagatataaaatgcatttaattacacaagaaaaatcatagtattaactacacaagatatatagagtaaagaccatctcataattgcacaggtatcactgcatccctctctttgttataaatgtttaagtgaccttgttgttgtacacacattaaaaccaatacctcatttattgataagatcaatatcattaagtgaacaaagagacaaatgtcttgaattctatgaataccttctccatctgtccaaaagtttaacgactactatgttccttttagagattaagaataaagaaaaaaactatgatatctcttattaaatgagtggtggttggggagaagataataagagatggtgtttggaggtaagattgagtaaaaataaaataagggatggttggtgaagggagtattgctccataagtaggacaaaatttaaatactaaaggttcttatattttagggcaaatagagcatatctgaataagagtaagaaatttaaaataaataagtgatttcttagaatcgaatggagtagataatgtggtggacatcaccagcggctatcaggagaatgctggcggaaggcctggatgaacaccggcggcaactggtgaggttgcgagcgtgaaccaccgtgagtgtgatgacggcagcggcggcaatgggcttgaggtcatcgtcgatggctccctaaataacgacgtcatgtcataagcatgtaggcatgtactccatataaatgcaatacgtgttagctgaaatgggcaagagaaaaaaaaaagaaaaacacccgaaccatctaacatgacccatagcggaaggcactactatgcgctcgctcctcattgtgaacggattggtgctgtaggggtggcaatttccttgattgggggcacccctaatgaaaacggagcggatagtttccgtccgctccgaataaaaacggatacggatatcttttggatcggataattctcggatagtttagatgcggatacgaatacgaataattcggatacggatacgaattaaatttagccaccatatgtaagaaagccatctctttaagaaagtggcttacatcggatgtttacatgctggttgtagattcacatcaatacaatcacatatgtctccatcttctgcctacttttataattcatatatatgttagccatcaaacaataaagccaaatatagcccaaagaaaagtattcttgctcatacctgaatagccctattaacttgttggcctacgaggatttgactagagttttctccattgtttatgtatttgagctcttttcctcttatagttagaacaaaatatgacaagagggtaacttggaaaacgttatttcttttcattgcataaatcttgaatggtcaattttatagtgtagaccactgtatttatatatgtttgtaggaatccgatgttggtatttaataggtaatattttgcaattaatgcaaaatatataatatatttaattacatagaaaactatcctattaattgcacaagtaggatcgatacttcctttaggtattagactgatagcactcatttattgagagcaggtacaatagcaggctataagccagctataaacatattttaaagagataaaagaagagagaagagcagcaggctacagagctgtagccagctgcagcatggactccaagacataatgtgtgtatgaaaggtaggaccaggtataatagtatagtaaacaactattgtatgaattggctattacattgacaacattcagagcaagtttgatagtatagcccactactagctccaaattatctatagccaatgtaatagccaataagaaggacataaagggaaaaagcagaagacaagtgtcaagtaagcactctaaagtgacatgcgttatttggaatgattttttttaaaaaaaaatgaaccttttaaatataagagtaaagtccatcaccagtccctaaacttgtaccgttgtgtcatttcggtccctaaacttgcaaatcgatcgttcaaatcctcaaacttgttcgactgtgtcatccggtccttaaacttgcagatcactcatttaggtcctccaacttgttcagttgtgtcaccccggtcccttaacaggacggtctaaaaactttatatcaaaaattaattcataactttttcatgtgaacgctaatgaagacaaactttatatcaaatttgtagccctcgacacgacctacaactttgtagttgaaaagtttttgaattaaaactgtttagggtcccaaaatattgttgcatgtttatagattttgatattttaattttaaaattacattttgggacaaaaaaatgacttaaaataaaaaaaaatcaactacaaagttgtagatcgcgtcgagggctacaaatttgatataaagtttgtcttcattagagttcacatgagtaagtttagggacgggggtgacacaacttaacaagttggaggacctaaatgagtgatctacaagtttagggaccgggatgatacagtcgaacaagtttgaagacctgaacggtcgatttgcgagtttatggaccgggatgacacaacgatacaattttagtgaccggtgatggactttactctcaatataaattctttgagaacttattttcagatttgtatccttttggctacgctattttcactagcaaggtataacaattttaccacggtggtgtaatatcatggtgtgattttgctacaccagtaccaccactcgtagtggcatggcaggtcagtggtactatagtaccgcccacaccattgtttgtatccttgtcctaccatgctaccacggattgatttttcttaatttaaattcttcggaattggaagtagtagttattaatgtcaagagagcaaaggcaatttaaactatgcaaaataatttttggaatgattcaaaatatcgcttagaaaaaggttgatgcatgggcttgaattctcgttttgcccgatgcaagtcctatatactccacatgtttcatatggtaagactttctagttttgctcatatacatataaaagttaaagagtaaattgcattcacggtacatcaacttagtaagttggtgtaatttagtataggaacttgagaaatgagcatgctaggacaacaacttaccaagtgggtgcaacctagtacaaaaacttaataaatgagcttatgggtacaactacttgaaatgtgggtatgattttggtacaataacttgagaagtggtgtaaaaacttaattattttgagtatttttggctatatgtactcagcttttacgtactctgttgataatacttgcctgaatcttctctctcggttactcagtggagtgatctctctcttaaattcccataaggataaggaaaagtagacggttcgaaacccgtgcttaaatcctactcaaggttatacttatgtagatttgtacaagcattttttttttgtcattctagtaattcaaggtcaaacaaattttaccatgcagaaattttctagttggtaattgagatggtgaaaaaaatatctaaatcgatggtgcaaattaggtgagcaatatattcttacatattatataagattatatctacgggaatgctatgtgatgacatattaacatcgtgaactttcatagcactcattaaccaaaatagcatatctagccaagttattgcaccaaaatactaaattatcaaattcttgtattaaagcgcacccacctaccaagttattgcacttagacgtcacattctcaagttcttgtactaaatcgcacccacctgtcaacttgttgtaccatgagtgcaatttactcaaagttaatggatctagagacatatatatgtctagattcattaacatctatatgaatgtagacaatgctgaaatgtcttacattgtgaaacggagaaagtattatttagtgcgtttgagagaagggaaaaatgagaagaaatgttgagaagatatgtagagcgaggtgggtcattatcgcataattaattgagtataaattatttcaaaacttgaaaaggaaagattggtgttaaaacacctttctcataattttttttaaaggtactgtctaacagttcgagaagcatatgtgtctggaaaaacaaccgacttttctctacttgtgcttgtgtcaaacacctaatcttggtccaaattcagttacgcctagcaaagctttgggaaattggcagtgggtggaagacgcgtcggatgagggttaaacaaggttgactagttgagtacttcaggggctaatccaagcgtacatgggccggctgaactcttaacttgggttgggcccgccgttaaactcagaaaggaaatgccatcccgcgttttccctgggaagaggactcttcctcctaaggaaaaggaagagctaagaacccgacatgtcatctagctacccacattcccttccattttaaggtcggattaggtgttgttgtaatccaacaaggtttatagcaagattgctgatgatcaccttcttctcttccgatcctcttaataatttaatgttacttatctcacatgatgtcttaaatattgtgtagaaaccatgtctcatgcaaaacatggtttcattctcttttctcatttattcacatgtcacatcatttttcatactaggtgacagcttatttaagggcaacaacaatgtatatagcaaaagtagtccatatagatgggacccacacatatggactataactattgttatcttcacaatgtatatagatagcaactagtattaagaggggagaggaaatagagagaaataacatgttttattttatatgggcaacccatatgcttatagttggcttttactattttcttgctatggactggttccataatgttgttaggtggctgaatggaatattttattgcttatggactagttttagactacattgtggatgccctactgatatagacactattctagtcattgagttgaaaattgccttaggccattcccaacccaagacactagacatagttttcataaactccacatcataaaaaaataatagtactagacactactattccaatgcaaacaccactattccatacttaaatttaatgccacctatctcacataatgtcttggatgttgtgtagaaactatgtctcatacaaaacatggtttccttctctttcctcatttaatcacttgacacatcattttttatactaggtggcaacttatttaatgctattgacacaatcctagtcattgagttaggaatggtcttagtacctattaattaataagaagatgatatggtttaaattagatgtggcattcaaatcgactataaaacttcccctgagtagatagatagatgagacttgtaaagtgagatttataaaagcccacaccactacaaagctttcttccttcctttttaaacccaacctcccaacacctttcctcactctcctccctccctccctccctctccaacacgctcacccatgcaacccaacgcccgccaaatgcgcggcggcggcggcggcggcggcggcgggcaggacgacttcttcgaccagatgctgtccacgctgccggcggtgtggtccgagctcggctccggcaagcccgcctgggacctcacggccggcgccgtaggaggaggaggaggagcctccgatgaccactccgccgcggcgttcgacgactccgcgctcctcgcctcccgcctccgccagcaccagatcgacggtggaggcgacaagcccatcatgctccaactcagcgacctccaccgtcatcacggcctcgccgccggcgatgacagcggcggcgctgccgggttccttcccctgtcgctgttcgctgaccggtcgcaggacgacatcgacgccgccttcaagtcccccaatggcgctgtacgattctatatttctatcgcttgctatatagctcaacgattacaacttgaagggtgaattgaagcttcggtttacttgagctatatatggtgtttctttgggttctcttcttcgcagagaggtgaccatgcgctgtacaatgggttcggggccgccggaatgcatggcgccgccgccatgcagccgccgccgttcgggcaggtacgcggccaagaagcggttcaacttctccccccaattcattctgcttctttaccaaggttggaaacaactcaggaatctggattgtttccttgatttttgctcaacggagtttggtttgctccctgttcgatcaattgctccactcgtaagaatgcacctcttgttttcctcatgtcaaagggaggatcaatgccggcgcagagcttcggtggcggagcggccgcgagcggcggcggcggcggcgggtcggcgtcggcggcagcggcggctggggcatcgtcgggcggaggggcggcggcgccgccgcggcagcggcagcgggcgaggagagggcaagccactgacccacacagcatcgccgaacgtgtataccactctcccaccacctttcccttctcgcccccattttttattgcctccatgccatgttgtgtgagtgtgttcttcttgctcctggagctccacaaattttggaccaacctaacaagtcaatttgacctgttgcacacttcaaatttcggctagaaatggtggtttcggtagtaagaagagcttgaaatgagatggaacttgttgtgttcttgtgatttcctgagactttgcatgtgtttgatttgcagctccggagggagaggatagctgagaggatgaaggcgttgcaggagctggtcccaaatgccaacaaggtagctgaaaattttcctcacttttgctcctcttcttttgctttgttttacttctttgcgccatctttgaacaaagtaggaagctttccttgaaatgcgatgaagatgcacccatgctttctgcttttttttttgtgtgtgtaaatatcttatcttaaaacttagtgaccagctaagtgtgttgatttattgcagtattaacacatatgttctgtttctcttacaattaacatgatgtgatatcttcattcttcactgtatgattggaaaatagtaagtgcatcatagggtaggaaagaggggacatgaggcatatgatgcattgctgatttgatgttctgatgcttacactgacacatgttggcctttcattggagtatttgggttggtgattagctgctaacggtggtgaatgacacgtgtcgggctttcgttggatgatttgggttggtgattagatgctaattgatggtgaaggcagtagtggggaaagggaggtcagacatgatgccgaaatgaatgagaaatgtttctacccgttaggccaccaacagtaacagatgaatagccacagctcaaatttaggggaatgcagattaaactatggacttgatcattgcattagccaccaggttcctagagaactgaacatcaagaaaggaatggattagtactaggtgttatataatatatgcacatgtcttaacttcgagacatgcatttatacttggactatgtgacggctgcaaaacacaagaacaggagacacgggcacttgtctaatgttccagcctcgtctgttctccatgaactggatagagagcactacaagtcccacagctacatgccatggttggcacttctggagcttccagcgtcacgtctgatatcttgttttgcacaaactgtaatctgttttgtagtatctgaagcgataatgggtgctgatctgatgggatttggaataaaaactgacatccatcttcatatcttagctgatagggttgctccagcacaaagtagagtgacacggatcactgtcactgaaatgacgatgtggaatttcgttttgcagaccgacaaggcatcgatgctcgacgagatcattgattatgtgaagttcctccagctccaagtcaaggtaatctaaccctgcttttctacagatagatgaattcctgcctgttgctaataagttagtcccttgaatgtctcaaatcgcgcaggttctcagcatgagcagattggggggagcttctgcagtcgcgcctctagtggctaacatgtcatcagaggtacttatattatatgatgctttattttgaaaatctagagcactaccaatgacgcaatcaatggttaatggtactaggcgaggacttgctgatatgtgtaggacaaacatgtttagcccaaaatgctataatgatgtttattacagcacaaagtgactagggaaagtgttatcttttttaccatcaggttggtgataataggtagtcattatctgtcctctttaaagttagtgtattgattctgatgcatttaactttctttatttttataaacgagcaaatggttatctcttgtctaaagtagatctgtcaagaagttcatataatggaatataagcatgttaaatcttatcagtgattctaactttggcatttggaggactagaagtcagacgagttactaaaaacaaatgcatgcttgcaaaatagcataaatcaaaaggagatgtgccataaatttgcttaagaaactgatcaaaccttagtgggtaccaacgcaacaaaaagataaggtcggaaggaatcttggtagttcaagaattggatccaaaaaggacaaacacgcctgaaaagtgacaaggtagtactactgaaaaaaaaaatcaagcataatagtattagcctgtagaagctactaacccactaaggacaattcaaaccccttaagtctgaacacacactagcagccgagctaccataaggtcaactacctcaaatgtgacaaaaacgcccatcaattccacatcacctctctgttgaagaaatggcacagagattttacaatctcgagtcatttgctcaaattttaggtgtgtttttttgcagagtaatgggaatggcaatgccaccagcagcagcgggaacggcgaggcggccaatggcagcagcaacggcgacaacaatggtggcggcacactgcgggtgacggagcagcaggtggcgaagctgatggaggaggacatgggctccgccatgcagtacctgcaggggaaggggctatgcctgatgccgatctctctcgcaacggccatctcctccgccacctcctcgtcgctcctcccccgcactgggggaggcgctggagggtccctacatgaaggtggtaatggtacatcaccaccattggtgaatggcaccgccaccggatgtgacgacgccggaggtaaacagtgaggttggacagtgtccatgggaaagttgagtgatcaggatatgtcttctaattctaggggtggaattgtgaaatggcgatgctcttttctttgcctctctctctctctcttttgttttgtttataagaaaaatgatgttaagcatgcgagctttagttccagcttttcttgttgatatggtatagtagcttttctgatatctttcctcctctccttttgagcaattgagctttgagctgctctctaatataatctctagcagtattcttttctgttaaatttgtcgtggagctgtcgtttctcctgctgaatgaagactgtagaggtaaggaggaatcgaaattattggtccagaagggaccctgatcatattctgattcaaaaaaaatatcagagtacttcgtagcctggaacaggcatcaagtgcaaaggtttgtcgttggagttgaagtttgtgcgtgaatcagggataggatatgctctgctctctaacagcagcttaagctgtaaagtctccttcacgctgatgcaatccaggcgctttccggaccatcagacatatagaagattagatgcagaaacaacaggctgtacctgttcctgaaaattacctacagaatgtgtataagaaattatatatctaacacttgagctggaacagttaggtttccccttacgacgaagcaccaatgattgcgatgcaggaggcaacaaagttgaatgatatgaagagggcaaggtgatatgttcatacatgctagctatgctactactccaaactgcaatattccttcgttgctttcaactcgcacgtcgcgatgggctggcttcaagtaaacaaatccagaaggaatgatatgatgaatagattcaaggattcggacgggagatgcacccacgttggtgaagtaaatgaagggcatctttggtcgtgctctaaacaaaaatatcgcagtgacaactctgatggatgagttaatacaatgaaaaatagtctagaattgctctagagaaaaccaaaatacaagactggacacaagatgatgaaaaaattttaatgcgagacagatgaagccgcacaactgttgcaaaaaggaaaatgaaccgaaacaaaggccaagggattctcaaccttctgcctgaaatttggaatctcaaaggcactagaaaatggagtaacaaaccgcattactaacagagactgtaatagtaatagatatttcaagtgtaaagcctaacaaaaaggttaacagcgacgatacattgatgtgaacgtacccaactttactttggggtagattccttcctagccatgaaaagcagtggatgtattataactacagaaggaaagaagaattccttccctggtgtaaaagcagaagagaactactgtaccgtgcaccaaaaataagcagcaggttgcagggatggggaaagctgcttggggattgcacggcaaatggattacatgacacatcaaaccatccctcttgttttggacatccatgattaaatgctgagcctgttgcagaattatcataggcgagaatcacctaaaggagacagcattggaatcactggaaaggcagcattataaatcaaacaagggataaatcatgatcaagtgggtgtttcgccctccatactttaaacgataaatggatagacccaacccgctttgaaccacatggtttaatgttcatcacttatcatgttcaaatctagcatatctccatattataagaactcaatgagctctggtgatatgtcatgtttaactccaaactctactctagcccatttttactggtactcaatgaacaccagagtcctgacagttttaccccttcctttctaactgatgttggatgatgttatcaaattaatagggctggtggatgaagctatagcagacaaaacagtaaataaaaagaagaaacttcatgccatctgagaaagtagaactcaccaaatctatgtagcagatgcagatacatcatacaaagaataaattagaacttcaactaatctatactgcttcacgtattgatggttctctttcttttagaagcattaggcgctttatctcccgacttagatttctttgttgcttctgattcaagagactcttccaatttctttagagctttgatcacccagtcagaaaaaaaaagattaaatttaacacaaatcatatgagtaataatgcattagtgcatcttaaacaaaacagactgcaaccttaccagaggaaaaaactgggcgaagggtttctaccgattcctctggtagtgaatgaagactgcagctagaattatctgccttcttgagcattttgtcaaaagccttaacctgcaaagacagcccaaataaaaagaaaagagttagaatgagattttagacttatggcacctgctctcagtattcaattaggcattcttttagtgaaataaagtagaaaggttacacagaccatagttatccacacatctggacatatgttgcaataaaaaataagcatcaggtgttttatgcattggtaagtcctaaaccaaaacagaaagtcccagtgctaggtaatcggtggtgccccttctgttttctacaccatatcaattagcgtcaatctaacatataccaagtcaataaatactcaacttcttttctatgtttttaaacatcacaaatacaggcatgcgattaatctttcatgtgcaagcttcctacacatatagtcatatcatgtaattaccatgtcatattaataaaatcaactcactgtatattattgtactagaagaacggaaaactacttataattgttcagcaatgtattacctcatgtttccttaaaaatgtgaagcaagaaccagactctcccgcccgagcagtacgacctgctcggtggatgtatgtttttacatacggtggcatgtcataattgataacatatcttaagccatcaatatgaattcctcgagccattctatctgtaccaatcagaacatctatcttcccttccttgaaggcatccagtgtcttcctgcaaaaaatatgtgttgctaatcccgtaacttatcatggtgtgaataagttcaacataccaaaaattacatcctatcatcaacagaagttacataggtcttgcagttcaaacttcaaatccacatgatccagaaaatattatgatccatagaacttgaacaaggaatggtcagctagatatgatatttgcatactatttttatgttgtctatttgctaacagctccatgaaactgaacttacctccgagtcgattcacgttgcaaacgtgaatattcactaaatttgaagggcaagtcttcgaaaaattccagcaaggtgctcagtctgtgactggattccacagatgaagtaaaaactaaacatttttccccacgcagctcttggagaagaacaatcagagatagtggttttaaatttgatttacagacctgcaggtgcaacgcatcatcaagatgaacaagaaaatacagaatttccaaatagacttttacacattggatgcaccagcactaaagatgtaacggctaaaaatgtgctacatagagatgaggacaaaccagcttgtaggactgaagctttgttggaattctgtagcgcttctttccactattcaacagcaagggatgttgcaactcaagttgagaaagcttgctaggatcttgagtcagtgtggcagacaaaactatcttcgccaatcttggaaaggatttacctttaaaaccacgctcaacacccctatatgccatagcatagattaatcaagttttgaattgaagtacagatcaacaaacaatcctcagagctacaatagcaggaagggctgaatcataacgcataagtattacaagtaatatgtgaactttactaaaaggggagtgtaaaatactaaaatatgacaatgtaattaggtagtgtgggactaacgatcgtctaatggtagtcaatggatgcagtagagtttctccgttcatgtctgaccaggaatggttttgatcactcgagcgagtaagctggataactgttggcaaccaagactgataagcttctctcaacatcctgtccgtctcatcaacaacctgaaatgtcaatatattaagtagaaattaaaggcactaaaaagatggaaaagaagactcttagtgctaaaatcaaagtgcatatccaagcataaactgctggtctggtcaatccaataattatgtgaaaccaacataaggtaaaatatattaataaactattttccttattccaagctgtcctggaataatcatgttcttgctattgctgattgaacaaaagaacaaacaagtaatcttaggaaaagtaagcaagcggggaagattaagggggtggaatataactcaagaggacacatagattgttcccatcaacctaccaggtattgaagatgctccaggctgaaaccttttgtcatgctgatatgatccatcagtcttccaggagttgccaccaatatatcaactttagtctgtggttccatttggatatattcttcatcaagacttgggaaaagcccttgtttagacttctcaataagatttgaaacttcatccgctattgatgattgaccaactgctgagcctactgacaagcccacaacaggagcaatagcatcaaaaacctctttaacctgaaattgaacaaagaattcatggaacatcagtattgttcaacataacctgaagaacatgaaatagacttgttgactagctgttctggttagactagcatgtagaaggtaaaaggaacagcacaaacctgcaatgctaaatcccttgtaggtagcacaaccaaagcacgcaagcaccttacttttcgagtagcgagcatttgaacgataggcaaagcataagcaagagtcttgccagatccagttggggagttaatacagatatccctctcaaaagcaccaggaccaatagtttccagccatgctgctacttgaactggaaaaaatgattctatccccattctctgcaatggcttcaccaacctaaagcagtaaaacatagccaacacaggagtaaacatgttagtatttcttaacagcatgaagtattaaaagcatcctttctaagtacctcaacaaaattaactgcactgaaaacgcattcaagaatagcgagggaataaaggagattcgcaagcaaaacaactgaaattacaaactctcttagaaccaaacaagatgggtcatgggtgcatatgtgtgttttagagctaaccgaacttgtacaaattccaactctgaatactcggacaccagctgaacactattagcttagtgaaattacacaacgccattgatgtccagttggagtaacatcttatggtcacacacaaatcgcctaatcccagaattacaaatcaaccgtgaccaaaaaaaaaaaaaggaaaaacctacttgatagttcataccccacgaggatgcaaactaattagcatcctcaccgcatagttatcgacagctaagttcattccatgcataaaactttcacagtgccacgacgcctaggagctcgcgtccaagctagcgaatcgcttattcaagtgatcgaaagtatacaaaaagaggggggtgtggaggggggggggagctcacctgggatcgagacggggaaggtgcgcgacggggcagccggagaaggagtcgatgtcgacggggttccgcatccacggaaggtgaggcacgcggctcgacggcccaccctcctcctccttcgtcgccatggccaccaccatcacacgccgaggacgacgattcaaccgccaaccagggtcgtcgccgtcgccggcgccggtgagtagaactcgcaccgagaggcgacaggcgaggaggtgagtaagcggcggcggcgaattagggcgtggagtagtgtgatgaattcgcggaggccgccgcagcgcggggaagacaacgggccatcttctcgtgggccgcaagcaaaccaagcaggccacgttttcgtgggcctcaggcaaagtagacaggccgagaataaataggccgcgtctgcccgtgcggtggcccattccatttcccccggggtccacccgcacccttcccttccaccgcaagctttcccgttgcggtgcggatcccccacctcttctccgccgcctcgctctccgggatggacccctccgccgccgccgccgccgccgacgacgacgacgactaccacgccaccacgggtgggatggagccgcgtggagaggaggacaacggcgccagtacaaggggcgtcaccggtcggctactcgcttggcgcggggaagaggaagacgacgatgacgcggaggattcgggaggagggagcggagcaggcgccaacgccgacgaagacgacgcggcctccgctgtttcccttgacaccatcagcaacgactcgatcctgcttccgccggagccgacgagcgccaacctggcgagcctcctccgcgcgaggaagctgatcctcgtcgtggacttggaccacacgctcatcaactccaccagattcgcccacctctccgacgacgagaaagccaacgggttcacggagcgcaccggagatgatcggagcaggggcctgttccgaatggggctcttccggatgatcaccaagctcaggccgttcgtccatgaattcctgcgagaagcgagcgccatgttcgagatgcacgtgtacaccctcgggaacaggaactacgccacggcggtcgccaagctgctcgaccccgacggcgcctacttcggcgaacggatcatatcgagcggcgagtcgtcgcagccggacaggaagagcctcggcgacgtcttcgggtgggcgccggagatggagcgagccgcggtggtcatcctcgacgacacggcggaggtctggaaggggtacagggacaacctgatcgagatggagaggtacctctacttcgcgtcgagccgcggcaagttcgggatcgcggtgaggtccctggcggagcggaaccgggacgagagcgagcgcgagggcgcgctcgccgtggcgctgcgcgtcctgcggcgagtccatggggaattcttctccggctcggtgtgcagcggcagcttcgcggacgtcagggaggtgatcaggcaggcgcggcgcgaggtgctgcgcgggtgcacggtggcgttcaccggggtcatcccaagcggcgacggcggccgcgccagcgaccaccccgtgtggaggagagccgagcagctcggcgccacctgcgccgacgacgtcggcgagggggtcacccacttcgtcgccgggaaaccggtcacccgcaaggcgctgtgggcgcagacccacggcaagtttctcgttgacacggagtggatcaacgccgcgcatttccggtggagcaagccggaggagagaatgtaccccgtgaaaggcgagcattgaggacattggaatggcggcggcggcgacgggcggcggtgcactggaatggcgttcatgatgccgtcgagatcgatatgcttcggatcgaagttgaggctgccaatcttggtctggcaatggtcgtgcagcgatgttgattttgattcgttgggtgcactgtattctgtaggaaatcgatctggaaatgaaccaatacagtactactgaccaaagatgatagcgaacgaggtaaaggttagaactctagatcagcgtaaaccatctcttgtattcttcgatatacgcagattctgatcatatatagcgacgccatatgtttctttgcccgcatttttcggttgggcgtcgatcgactcgatcgccgatctctttttagcagaaagtcttgcgttctctctcttcaatgcaaccatctttgtcttgggaagtgtctggttatcgtgcgcttaccgtggagtacagaaaggattaccggtttgctaaatgtgttcgaatttaaattttgggaaaaaaaacaaaaatcttttaaaagttgctagaagtagtgcaacacctaagagcacacatccaagccattgaatcggttgttcaagtgaagtgatcaggatcgaagggaaaggaaaaagtacaccgaaggtccctcaacttgtcatcgagttacagaatcgtccctcaaccgcaaaaccagatatatgacatccctcaacttacaaaaccggtcacaataggtcattcggtggttttcacaccagtttaatcctatgtggcggctgagtcagcgtgggacccatatgccaatatgccatgtctctctccgttccttctctctctcacccttctcttctcttcttcggcaagccggccggcggctggggagaaggccttctccccagccgccggccggcttgcccaaagaaagagaatggaagagaagagaagagaagagaagagtgagagagagagagaggagggagggagagtgacgtggcatcctgacacgtgggctcacgctgattcagccgccacgtaggataaaaccggtgtcaaaaccaccgaaggacctattgtgaccggttttgattagttaagggacgctgaatatctggttttgcggttgggggacgagtttataactcaatgacaagttgagggaccttcggtgtactttttcctaagggaaatgtcacgactcacgagcagcaagcaaagcaggaaggccgagaataactgggctgcgtgggccatgcggtggcattttacgggcccatcctccttccccccgcgggtgggaacaaattggcacggccgcgcccaatttcatttccccccatttcaattcatttcctccgggcaccacccgctcccttcccttccaccgcacacttcccgttgcggcgccgatcgccaacctctccggcagcctcgctcgccggaatggacccctccgccgccgcccactggtgggatggatctggggggagaggtggaggacgacgccagtgcaggggccgctcctaaccctggtggaatcgccgggggaaaggagggagatctcgacgcggaagattcgggaggagggagcggagcagacgacgccgccgccgccgtttcccatggcgccaccagcaccgactcgatcgtgctcccgccggagccgacgagcggccacctggcgagcctcctgcgggcgaggaagctgatcctcgtcgtggacttggaccacacgctcgtcaactccaccgcggattacgatatctccggcacggagtacgtcaacgggttggcggagctcgtcacagatgatccggggaggggcctgttcatattggatcatgccagctggttctcggcgttcatcaccaagctcaggccgttcgtccatggcttcctgcgagaagcgagcgccatgttcgagatgcacgtgtgtacaccctcggggacagggactacgcggcggcggtcgccaagctgctcgaccccgacggcgtctacttcggcgaacggatcatatcgagggacgagtcgccgcagccagacaggaagagcctcgacgtcgtcttcgggtcggcgccggcatcggcggcggagcgcgccgcggtggtcatcctcgacgacacggcggaggtctgggaggggaacagcgacaacctgatcgagatggagagataccactacttcgcgtcgagctgccgggacttcgggtcgccgtgggagtgcacgcactccctgtcggagcggggcgtggacgagagcgagcgcgccgcggcactgcgcgtcctgcggcgagtccacgcgggcttcttcgccggcggcggcggcagcttcgtcgcggacgtcagggaggtgatcaggcggacgcggcgcgaggtgctgctcgggtgcacggtggcgttcacccgggcgatcgccagcgacgaccaccactccgtgtggaggagaaccgagcagctcggcgccacctgcgccgacgacgtcggcccggaggtcacccacgtcgtcgccacgaacccgacgacgttcaaggcggtgtgggcgcaggtgttcggcaagttgctcgtcaacccagagtggatcaacgccgcgcatttccggtggagcaagcccaaggaggaacacttccccgtccgttggtaaaccggatcgaagttgagattgtcagttacctcgccaccagcattttccagtgttgcacgtactggtatgccaatttcattgcatcgagcagtatcgtttgacagaaaaccccccttacaaatcttgcaaattttgaaccatccgattgctttaagattcatgcaggcaaccaaactctaaaaatcctctcgcctctctctctcccgattcatcacgcgccgccgctcctccgccctagcgcgccgccgcccggcctcgccggctggccgaatggtgtcaacggcgctcgcgaggcccccccgaccggccccctccctctccctctcctctcctttgcctcaagccggtggcgacgagctgtccgtcgtcttccccgtcgccggcggcggggcgccaccaccggccgcctcctccccactctttccgctttgcccccgccgccgtcctccagccccgcggcttcagcggcgccgccgccgcccgcctgatccgccgggctgccgcctcccacggccatccctctaaagccggcgaactcccccttcttccccctccccctcccccccacccccaccccaccctgggaccctaattcgtcagccctctaccggagtttgggtttgccggcgccggagaagaagaggtggtcgccggagttggagaagaaaagcacgaatcgtgaagcacatctagtgatccaaaatttgcaagatttgaggtaggattttctgtcgacagagctttagcaattccgtaaaactaaactttgtggaagtatctatatattgtcattctttgagactcttatcttagcgacatgcatgcatgcatctagaaaaagtggttgtgccttatattatggaatggagggagtatatactttggtggaacaggaaactatagctaatgatgtattttgtaaggtgcaataacctaagttttgtattggaaataacgggatttatgtctacatatatacatatggcacacaacaccatacatctcatctagtttctttaattatcagcactgagctcctttattagtgggcttgctggaggctagagcccaagcagttaggctgaggaagtgaggatggtgctcgctggctagtctgatatgtatacgggggctaaggacatgatatgtgctccctccgttttacaatataacactttttagcattgcctatgtacatatagatgttaataaatttaaacacatacatatgtctaaatttattaacatctaaatgaatgtggacaatgctacaaaatcttacattgtgaaacggaggaagtatatgcgatgcgtcggctacatcagagtttcatctcgttgagtctgggttttgatcttgcaccttatctaacgttttaaaactttgaccttttggtttctgcaaacaaattaaagacttatgggccttagcctataggtttagacaatgtaggccaagttattgaattgcctacaagtatgaaagtaccaaattacctataagtgcaaaaggctcgttctgtctacaatctaaccttgtcggtggtgtaattatgggcaattagtgtcacccatcgaactgctattggtcggtcaagtgggccatgaatgtgtcatttttttctttccagctaaactcacataatcgtatatatcatgcctctagataggggccacgtaatcatggtaactcaccgtaccatggtaccgaggaggtaccaatgataattttaggtatcacaaatattttattgttgcattatagagatagtgatatagtaagagtatgatgatatatccatggcacccactacttagaatgtattctctatacctatctatacctatctagttcatccccacttagtgtaattgctaccatttaccatttatatgtattctcatgcttccatatcacataaattgatttggacctgcgttagcgaaaaaaaaaagattcaaaccattaattagatcagagcagtgtggtcagatcgatactaaacatcatggtcatgactagacatagctaaaattagaggtagtaaccacttccactataaaacttgctcttagcaagctgtctgtaaggcttttcgggccatatcgtaagaggtttgtagagtatgaagtcaattaaaatggtttggctaaattttggtggagtaaggaatatgttcatgtccttatatattttcacactagacaatgtatgaaacatgggaatttcgctatcgtcacgtcatgatacaataacatctcttgtaaatatatgtccttttattttttggggaaacatgttggcattgcctcagatgttcaggtttggttggcaagagaagagacaagagggtgaagaagccgacatgtgggttccacgctgactcagtcaggttgaccactatcaagttgtcatgtgagccaaaaccggaaactatactgccctagaaccagtggcggagctaggtttggaggaggagggggctcagccttcttcttcctcctccagccccctctctccccccattttcttcttcctctccctcttttccctcctctcctccctcacatttccatggagtccagcagggtaggggggctcgagccccctccaccgctgcctaggatctcaggtacaccaatacacaattcaaacacgtcaaagacgaagggcttaaagtgaacttattccctcaacgcacgcacaacactgaattaagtgtggcgaaaacaacgggaaatcggcccatttcctatatcctggcccaatatcaatccatttttctagggaaaaagtgcgccgaaggtccctcaacttgtcatcgggatacaaaaacgtcctcgaaccgcaaaaccggatatacagggtcccttaactatataaaaccgatcacctgagatcctttggtggttttgaccccggtttttgtctacacggcggctgagtcggtgtgggacccacgtggaccccacatgtcagcgtgccacatcaccacccattacttcccctttcttttttctcttccttttgttacttctctttgccgtgagggagtagcacacggaacaggcagcagcgagccgggttgaccggcggtcgacgcaggtggcctacgagcgcgcggcggccggcgaagcggagaagagcggaggcgcggagtggcggtggcggcaggcgggcgagcgtggtggccggcgtcctcctcctcctccaccgccgcatcgacggtgtgtgccctgtttctctcggtggtcgtcggcgtcgccatggtagtcgtcggagtctgttagcaacccgatgcaccaagcaaatagcaacaatatctaaaccaatttgaggtgaaattgagcaagtagctgagtattacaagcttctagaaggttctatagagggagacaggaagggtgtagtggctggtaggaaggagtagtgagggagagagatcgacaaggttcctgcccaaacctggtcgccgctgccgccgtggccgaagccgccgattgccagttctgttctatttcccctcctctcctgtaagctgctgttgcccttgtattgtttcagcttgggcttgcttgggcttcttggcaacgggttgcctagcggcccatgtgtagcccagccgagaccctgacaatcccttcttcttgaaattcggcttgtccccaagtcgatgaagaaaacctcctggatcgaatgatgtttgaagttcctcttgtaaaacttgatgctcaagtacagcaaccataccaatctgtgtaggagcatcagataaccaggcgttgcatagcatgatcaaccatgcatatatcccagtcattaccaccatatgattgtcccttcttggattgaattcaagtaaaccggccatggagaatctggatagtactgcactaaatgtattccactccaccaccagtataacctcatgtatctcctctgatgcatgtactaatcttagcccactagaaagaaactgaggattgatagacaattcggtgagcacttgccatgcaactgtagctatcagttttgtatactgtagagagtatgtgtgtcgctcaataatctgatccactaaatgtgtttcagccacctgattaagcaagaaaggcaattgatttccatactttattccatagttatcggtgttctgttggctatacatgcattcttcaccttggatgacatttgcattagttggcaacaagcaatctaaagtattagccaagatgagcccttgagcaccactactgtgtaaagccagatctgggattttcttgagtgcatcactgtagatatcatccaagttttcttcaccttggaacttccatgcataaggtttcagataatcatttagctttgccggctggaacgaggccttcatcacctcccgcaccgccaccggctgcgcgcggtcgacgagcatggagaggagcagtgacaggttctgcttcagcgtgcggagcgccgggcggatgcgggcgtcagcgacaccgccgacatagagcccatcgtagaacgagtggtgcgagtcgaggaagatgaggcggtacgcggcgacctcggcgacgtgtccgaccgcggattgcgccgcggcgcgcgcgcggtcgaagtgggagcacggcgcgaggaggcgggcggtggcggcggacgacgacgacgagcacctgccgcgggagaagaaggagagcgacttgtcgagcgcgtggacgtggctgaggatgaagtggagcgtgttgagccggacgtagaggcgctacgtgccgcggctggtcgacgggcgcgggttctggccgccggacgccatgccgccctggccttggtggtgcccgtgggcgcgcgggctcgacacgggcacctggcacggcgtcgccaccttcttccacagcctgatgattatcgagtcctggttgcacctcgtcagcggcggcagcgacgggcacgcaccgtgtccttccattatcccagctacccgcgttctcacaatggaggcaccgtggagttcatgtctctcggccggagcaagaacgccatcgtcggcatcgaagaatggctacactacttattcatccaatcacagaatctccaatatgatatagtactactatttactagtataggaatgaatattcagggttagtcgtacactcataccataaactactacttgcatgctccatggctatcacaattgtatgacaaaatgaagatccactttcttgtctctcatgctcgtcctcaactgaaacaagacctccaaaaagcttcaggatcaaccaaaccattacatacacaacatacagactataaaccttcacaatcatcgatcacaggctataaacaatgacgaatcaagcaataaaaaggagatttttttaaaaaaatatcatattttcacggtgtctggtgtcgctagcggcgaagaacggcggcctgtacgtcatggagatgtatccccggggagacggccatgtcaccttcgaggtgctcgcctacggccgccacagccagccgccgcccgcctacgtcggcagcagcggctgggccagatgcagcatccaactcgaggactggcactggcgcgccctcccgcagcctccctacgtgcagtacccgggctacgaacgcgacgaggcgccgccgtgaaacacccttattacaatatcacggcgaccgcggtggtcggcgactcacgtctctggatatcgacggagggcgtccgcacgtccgcctttgacacggtgcgagatacctagagcaagcagggcgagtgggcgctgctgttcaggggcaacgccgagcacgtcgcggagcacgacctctggttcggcctctcgcgccacggcgacaagctgtgcgccctgcggcagcacccaccaccctttgaccgcttgacgcggagctccccgccggcctcctcccctccccacccgccggtggtctgcagagagagagagagagagagagaggaggaagggagagaagatgggaaataaagggtggtgacatggcacactgacatgtggggtcccacgctgattcagccgtcacgtagaccaaaatcgggatcaaaaccaccgaatgatctcgggtgaccggttttatataattaagagataccgtatatctgtttttacggttcgaggacgtttttatatccgatgacaagttgagggaccttcagtgtactttttcctttttctagtgcacatgaaaaggacaatttcaaaattgagattttgcgagcaggggcgatctgtggccgtccattcgttgtggacgttaaatcgaccccgtcgatttgtgatagaggttacgccgcatctgcgcgacccgctaccacccacacatcttcccgtctcaaaacaaaaagaaacaaaagaaaaaaaaaatccccatttctctaaaaatctagaggcttcttctcttctcctctctctcgttccccttcgtttcgattcgtctcgcccaaatcttcaaatccaaatccgcagcggaggcggccggggcgcggcggccagatcctggaagagaatccattccgggaggggaatccgcgcatgccaatgtcggatcccacggcggcggtcatccccaagccggggggcatcggcgtcggcggcggaggcggcgacgacgaggagccggtggagatccgggaggtgtgggcggacaacctcgaggaggagttcgcgctgatccgcgacgtcgtcgacgagttccccttcgtcgccatggacacggagttccctggcatcgtgtgccgccccgtcggcgccttccgctccccggccgactacaactacgccacgctcaaggccaacgtcgacatgctccacctcatccagctcggcctcaccttctccagcccgcgcggcgagctccccgcgctcggcccaggccgccgccgatgcgtatggcagtttaatttccgcgagttcgacgacgcccgcgacatcttcgcctctgactccattgagctcctgcgccgtagcggcatcgacttccgccgcaactccgagcgcggcgttgacgctcgccggttcgcggagctgctcatgtcctctggcgtcgtgcttaacgattctgtatattgggtcaccttccacgcgggctacgacttcgggtacctgcttaagatcctcacatgcagcagcctaccggacacgcaagccggcttctttaagctcatgaagatatatttccccaccgtgtatgacatcaagcacctcatgaagttctgcaatagcctgcacggtgggctgaacaagctcgccgagctccttgacgtggagcgcgtcggagagtcccaccaggccggttcagatagcttggtcacttcatgcgcgttctggaagctcaaggattcgttcttcgctggctctaccgagaaatatgctggagtgctgtatgggctcaatgcggagaatgttgtcagtgcgcattgatggatggtactcctctttgaattttagctttgtgaatggattgatttaggacagaaaatgtgacaaatgatcaagatgatgttatgtaggtcaagtttgtctcactccatttgggtttaatgtgatcctagtgttcttcagttattcgcgatgaaatagtgaactgtatttatgttaagttgttctgtccgctttcattttctcctacctggtttagttagataggaaagaaaaatcacctttaaggattaggagatggtaaaatgaatatattttgttgctgttttgtcattgatatgtatagcatggaagctggttgtttccaaagagtggggtgcgggtacatcaaagtgctcaaacatgtaacttgataacattacaatacaatacacagagcgcgacctctcttcacatgggtattttagatgctgttattttaatttcccagaataattagttactctaatatgtatccttctagagaataacacaatgcaatattgagaataagggcatctctctatttcgactttgtgctgcagtttttggtaatctgaggtaatgctatctggtctacattggaagcctggaaacatttacggttttcagccaaagttttctactatttgttcatcaattcaattatccagtaagcctactgcctagcgaatagttctgggcttctggccaatgttcactaggcaaaacctctgtactccatggagtaaaactacagtgaaatcctgcaaatatgcaaattctgcagatttgctaacaaaatattagatacgcatctagctatatgtgtctcttgatccagcaattaagtcacaatgatgcacagagcatgaatactagcagtttactttttccataataggttgtgggttacagtaacaaatatgcatgtcttgagacagtgatgctgatactatttcccttgccttcctgcaacacttggattgaatttctacttatccaacttatattctagatacaacattgatccatttacattctttgtgaaaaacttatcataactagatgagctttgaccacaagttacatcattccctgcaatttaatagcatcagattatttcattgctggatgtaccggaccactcttttttgctttgcaactagaatattagttcctttggcactaacatgtcctcaaatgttgcatgtggagatgaaatctagggcatttaattaagttactaacgagtttatttacaggttctgttggaacccaatttagagaagaatctagttagctacatcttctcgttttattaagactcaacttggacactaccttaatcccggttgattgccattgtccagtttatttaaattcatgtatataatcggtccttcttaagttcggacattgttggagagctattctgaataaaggtaatggtggctaacaagaaacaaggtaaggattgttagaaactggagaagtttgggtgccaaaaagcttcaaaagtattgaaattgtctaatgtttcatattttgcaggtaaacctgataatactttcctagtgtatcattttttaacgggatgcatttctggtgttaaaatgtggtactcgtcatgccaacttgtgcatgggttcaatttgaagactgagaagccttgtgcacgcatgaactttcttcatcacagattgatggcagcagcagcctatctcaattccccaaatctccagggatgagatcaaaccatctgcattgcacaagcttcctcccatggataatgcaaatgtgtaatgcttatgcaattgtaatgtgtagtgttaaacagttgtggtcatttttgtgagatctgaatactgattccataaatcggggctggccagaaacaagtgcttattgcatccagagaacatgttttcagtttgcctcacaatttcactaaaaatatcagtacagatttgttaacctccaaaaagggaacacagaaggcgagctaatatgcaagtttacatcatgcaaagaaatggcctgaagtttacattagaaagaattaacatttttcctgtcaagtctctattgacaatgaaaatcttaagcaggcaggagtcgttctatcatccctggcttaccgtcaagatctttttctcaaaacaccgtaattggatcaaaagttcaaaacagttgccatcttaagtaatgcagcgcagtgcactgttcaccctctaatctgcaggttcttagtgtaattctgcgttttttggctgcaaccacaaagacagtcgggtgagttatatttgccgtgtgtgctcataagcagcaactgttcatagcctacccatttacttttcacgtgatgtctatcttgctggcacgtatgatcaattggtccatttcttcgtccatatctatttgatctcctgctatcatctgaggaatattttgtggcacaatgtcagcattaatatatgccccaagcaatgacttgtacaggggcaagcttgtcaagttgaacttttgaagaacctttatgaatctatctgcatcctccacactgccttgctcctcgaaatactttgcaatggcctccaacagctcaagtggaggtctccagtggcaagtcttcaacagagataagcccttcttcatggcattgacagctttatccatctgcttactctgaacaaatccctccatcagtatctcccaagtcttgtaattcggatgcgcacctttctctagcatgtggagatgaagcctctcagccttttcgatccatccattcctcacataagcaccaaggagaacatttgaaacccgcacatcgtgcttcttgctttctgcttcccagcttccaaaggtccactcggcccgaccaatgtcgccaacttttatcaagcataccatagcagacatgtagtttgcagcagggattctacctggaacaattttactagcctcccacagcctaataaccccatctctgtcattcagggctgcataacatgtcataatgaaagagtaccctaaacgccctgttgatgacaactttgtttcagccgttctaaggcaagcaagagctttactgctctgtccatacttcttgaagatgttagctaatgtacagtatgtgctccaaccaacctcaaccatgtcatcattcagcatctccttgaatgctgattgtactgaggctaagccagagacctcagcacatgcattcatccaaatgttgtaggacagaacatttcttggaatgttgttccgtttcatcagataaattacactaaggaccttctcatactggcacgttgcaacatatagtttcataatttcattgaaagaatgaggatcgacaggcagtccatatctctgcagctcagccatgaaggtttcagctttctgcacatttctttctgtaacatagcaatggagaagcgggaatgacgcggccttcttggaagcagcagtacttagttttctgtagtactcctcagcttgagaagtaccatgaacttttgcaatcaaatccagtctaaccatatgatctgagggcgatagtctaaaatcattgtgcgagtccatccatgataaaatctgcagcataataaaattccgtttaggtagtgccccttgcatcgccactgcgcgatatagattggaacagcaataaacattcagctgagctgtgcaagtgtgtcaataaatcatataacaaagagtgaaacaatgttcactttgcagcataacattataaggaattattaagaagtttgaatcaaattgttgcaaaggtgaaaaagactcctatgtcctatctgtatcagatttttctcggttcaaattcgttcatcaggtagagctgtttggagtgtgctcacctccagggcttgctcgtagcggcgcgcgcggcgaagccggacgacgtcacggcggagctccggcggcgagacgcggccgcgctcccgagcccatctctcgacggcggcggccgcggcggcgcgcccgctcttcctcgggatccggaggaggcaccgcgacagtaggtcgccgccgtcgccgtcctcgcgagcagtcgccggaggagcggaggaggaggaggaggagcagcagaagggtctagggtttgggcgggaggcgccgacgaggagggcgagaaggcgcgagcggcgcacgacggcggccatgggcccaaacaatccatgggcttgcttgctttaagaaagtttaccttcttctcaatccctttttttaaaaaaaaaattagtaaatttcagaaaactgcaactatagtcataaaactgtagtgtgctgcaacattagtgatctatttcagtttgctgtaataataacgtggaaaattatcacaaaattacaacttttacgtgatatgcgtagaagttacagtttcgtgataatttatcacgctattgttctagcaaactggtagttttgtgactataattgcagttttttaaaatttactcaaaaagaaatgaagtgatagcataaatttgtatctcaattatagtggatgaaaatttagacatgtttttaaaaggctaactcatacgtgagacctaaccggattctacaacttcagtttcgctcccaattattttagataatagattaaaccggcctctgcatccaaacatatatgcacagccaagaagctccccaaatatatgtcctaaaatgtaaatccagccgcgccacggctgtctgtgccaaaccaggacgaggaagaagaaactgacagtaagctcaggtttatacaagccatcaatgtctctctttctaggtcgagttggcaacccatctcgtcctccagattactactacaatacatatattgacatagatacacaggcctagactagattacatcacaaactaacactgctagctagtacacagcatacaatggggggacatgtacacagatgcagacgagagatctgtcatatgcaagctccaagggagtagaaatcgccgcaccccaggtcgtcgctgaaggtaacatcatccttctcctgcatggaaatcgagtgtcagatagcgaaacagcgccgtcaacaagatgactattgcttctgatggtcttatcatcagcgaaaatggttcaataagtttgctggtatgtgtcacttttgtgtaatcttaatatggatgtcatggtaaaaaaaattaggtgaaggaaaaaatccttaccactttgactatggaattgagaaggccgtcgaagctgcagctgctagagctaagttcgctctgaagtttcgggatgctcaaatcggaggcgttcttcggcatcgccatatctcccgaaacgaggaaatctgtcttcatttgtgggataactgttgaaccacttgaggttgcttgcccaatcattctggcaccaatattgctactgttactactgctattgttccatctttggctcatagcatgatgagccccaatgttgcttgccaattgagagctcggtacagaactccatacgaacttgagatcaaacagactgtctgcagtcctatcatcgaacttctgtttcaaaccgtttccacctccaaaattcaagtacttttgctctgtatctggaggtaaaagcatcgcgccaccaaaagagctagctccaccttttgtgtctcttgctaccataaggtcatttgaagagcgagcaggtgcacacgatgaagatgtaccacccaatttgtttgcacaggtattgttaaacgaaccatggattagcaacccgttggcggaaaatcctgataaaggaatagtactctgctgggatacacgagattcaagcagaccagatgaaactccaacggcgccttcaatatgttctgaacttacagaggaagttcgaattgatggctgactgacaattttggcttgtgtgcactcggctagttcttgaggcagcaaaggactgcttgtgacactttggagtgtgccagacataccattagataggccattcccagaaaggatggtggacagatcatcggtttcttcatggatccacttctgttgcatttgggtctgcccaagcgatgttgccaaaccttgtcccaagtttcctttctggtttcctggtaagctaaggtggtacttatttgcatcattaatggaatggctcaatgtatggcttccgctcatagtctgaatcgattttgaagcaggtaccccctgagttccaagagctgctggattgtttctaggactgtttaacaatccatgtggagtaaaagatgatagagctgcggaagaggtaaaagcttgataaccctgtagtccttcaaatccacccatgtgcagaaaggggtctctacctcccaaagcagcaacgatgctaacttgttgcgacgccacagcgcttagccgtttgagatagagcctgtacttctgcgtggtacacaaagcttgagattagactctgcaaacaagttgtagtgtttatctgtgaacaatttgcttttagtgtctcagcatgagtcacagaatagcaccggaacttgtttttggttcaccatatatgtggttgctaaatctgctagaaggtttagagaagtgctgaaaaatgtacggccttttcctcaacttaaaggccactcatttaattgttacagaatctgctcttggaagcagaggggcaaagtacacaagactcaagttagaataggccttaaatgtgtaatagctctgtgttgataaaggatgccacagtgactttctatcagccatatttaatacagtattgtaaaacagtcagcgcacaattcattggtattgaagaacttctgaattcggttaatatttcttcagggccttagtaaagttgaaagatggtctatcttaagctatagtttcctctgaacagtaaaaacttgtagtgcaattaattacaatagctgctagctgtggtacagatttgttctattcaaattacatcattaccagtacatgctaataaatagaagatagtgaaatgagttccttgcctgtaggtgacttgcaacattttcccttgtgagtttctcaacattcatgagctcaagtatcctttttggcacagcctctgcataaatagaaaaaaattataatctcatcttttcacttatgcttatgcttattagccaaaaattgaattttcaaccttaaatttggagttgattttggggtttttttcatcgtagtttattttttagcctttgcttttagatcgttaagaacacgtatataaaagttttattcacaaattatttttcatttgcaaatatgtcgtttagttttttcctccaatatgccaaacgatggggccgtttctctctctctctctccaaaaaggaaaagattagggtgtaacatgagtcaccataaaaaaattgtgaacagcaaaatggaggcagtggtgagaacatactgtcaattccaagctggttgacagcagcgacaaatttccggtgtagttcaactgaccaaacaactctcggcttctttggagccgagggatcatcaatatcttgagtattgacctcaccctcatcctcctcttcactacagtactccttcctcttcttgctgggcctcccactttgatcaggtgatccacatgtaacatggccatgcacatggtctgaatccgcatttggtggcttgttgcactcttcatagaaatcgagattagcacggtcgcgagtactgaatttcctcctgataacatgctgccagatattcctgagctcttcgattcgaacaggttttaggagatagtcgcaggcaccatgggttatccccttcaatacagttttggtctctccattcacagataacactgcaaggaaattactaattggttaacatcaacatttccccctacccgtcatagaaggaaataagtacagtacagtgctcaggatttgctgaataaactgaaattgaattgatgctctgcagatacaagaaaaatcttcactcacagtggctattactatcaagaacagttgaactggattattggatagctctgagaagggataagattcatgacttactgatgacagggaggtccatttcaagccccacaagctcaagaagcttaaagccgtccatgtctggcatatggacgtcgctgataactagatcaaacatgtccctgttttcccgcagcattttcagcgcgatagcagcctgatttgttgtcgtcactggaaaaacaaaacaaaaattactctttcaagtgaatagctgttgaagatacaggaaggcatctgcgacaacaacaattcaccctaaacccccccccccaaaaaaaaaaaaaattgcagcatgcatttcttttatcaacaatgacaccataaatccagatcatgtaaacaatttacaactagacatctctgtagctgcatgcagcatatatagtatacgataacttcatgaaatattttattgaataaacataaagcattaggcaaaattctgaagaacatacatatagacatctaacaataaaatttgtaagaattgatattgctgttccaagacaaaaaaaaaaaccaagactgaactgcaaaaagaaaagaagaagtatttaccatgatactggcagcgcagcagcagggtctcgagcaccttgagacacaccgggtcgtcgtcgacggcgaggacacgcataccgacggggaactggtccctcctcctcgccgccggcaccacacccttcctctcctccgccgccctcatggcaacaaaaaacctcccaatccaattcacagcacaaaacccaagaacagcaagaaacctcccaatcgatgaagcaaatcaagaacaaaaaccaaccaccttataaccaaagttgcaggatgctgggaagcagatgtgggcaggggaagattgggattcagcttcaaggcaggcctcccaatccccagcaagaaagcaaaggcaaagagcccaaaggtacaaaaccaacaacctactactactgctcctgctgctgctgctgctccccaactagaacaggaaaagagaaagggagaagcaaaatggaaagaaagaagctggtggtggatttggacagggagaggagagagctggagagagtgggcatggagcttcaggaccaaacccaccaccatctccaccaccccatcattattgaggcaaagaggtgggaaagcaaaagggagggagttggagaagaaagcagagttctctctctctctctctctctctctgcagccaaaaaaataaactaaaaaaatgggaggaaaaaagcagagacactgactgttccagatggccaagcaagcaagcaaccaacctcagcttcagctcacacacatgtgaactactcctagctcagcagcagcagccaccacaactcccagcaagaaaacaagaggagattggagcaagaacagcaagaacatctcaagggagaagaagatgagggagagaatgtaagtagactgtccatctgtctgaattttaaggggtcaaaaatggtggagggcaacagaaattggggcccatttcatccacaagctccaaccgatcgctacagacgaaacgccatccctctgtagtctgtagtatgtactaccccgcaccggcgaaattcttgcgtctgtaaattttgtattgtatctcatgtatcaattggacggggcaaaaaataattttccatgaacatgttaaattggtactagtagtaatgtttttttttctgaggccttaaattagtagaaaatgggcattccatatgacaattccgtatctcatttttaactttttttaaaaaaaatatcattatttttttgagaatttttttggaacaaattttctgattaaaatgatccaaacttttaagagttgtggaaacggatgagacacatctcgatcacacaagtgaatatagcattgcaagctagtagtatcaacttgccacgcacaaatgaatagtatcgcacagtgactgtactcctacattgagggccttttgatttggagaaaaaaaaatataagagtaggagtttaggatgattccaaccctataagaaaatttcctaggaaaccctttaaaataaaggattgaatcatattgtatgctttaaaattcctatagaatgaataatcctagaaagattttgtgaagaaaatttagcaagagtttcaacctcttagaaattttcctttgaatctatccctttataagattattgtgtttttcctgtgattcaatgaaatggttattcttgtgtttctcctatattttataatcctctgttttgtacatgcaattgttattagaattatacgttttttttctatttcttcccttttttttcattggcccctacggagtaccaccaaacagtataataccatatacatatttactgcttgtataaaaatactgtagtaattatagagaagcgtacacgaacagaagacatatgcttgccttaacaactttagattcttcacacggtataccactactgcagctgggccccaaattataatcatccaatggagcaaacaaagacgacctgatctctggatctacaagtagttaatggtaaaacaccattaaccccaaagtaaaactccccttaaatgcgtgcctttaattgacgccatttactaacgcttttaataaccatccattaaagctttggatgattgattggaagggggcaccactccctcgcacacgaacgagattacgagatgaagattgtcacgaaaatgcccgaccgaccgagcgtgcttttttgtacggtctcattttctaaaacatgatataaacgaagacgctcataaacacacatcatatccttattagcatctttaaaatcctaatttaattactccctctatccaaaaatataatgtacaatcatgttttttcatgcctcataatataaaacatatgcgtatatatattaactagcacctcgatcctctaaatttggtttgttttaaaccatcgagctcttcaattatattgcttgtatgcatgaatgcgatccaaccaatgagaatgattaagggccagtttgttttgaggcctaaattaggcttgccaatttttttggcaaccttaacaataattgtgtatgtttggattgaagccaaattttgacatgcctatataacataggccattttaatagccaaattagtttaatttggcttcaatccaaacacatgttggccttaccaaaaattggcatgccaaaacttgtcaaaattgccaaattttggtaaggccaacattggtcacaaaccaaactggccctaattttttttcttaatctttatgttacgagtggtgagcatttttttttatagatggagtagcatctttgaaagactggactaatataacttaggattgataaagtaacacgtgtatattgtcacacattgaaaaataataattagacgtaaatacaagcatctatatcaagtccaggacttgaactcatgtgaatcggtttctaatcaattgagttatgctcacttcaccatacgatattattctaaccctatataaaataataattctaaatcatttcaatcttgtattaccatctccactaaataattagaatgacaaaaacaatcgatcatcggttaaagtgatagtagttttagatattgtttccgaccgttttcacccctagcggcgcacacacaaatcacctctatttcccgtgctcgcgcgcgcgcgcgcgcacggtgggggcggccacacggggggtcgtgggggtgtcgatgcggtggtttttcgcgcgcagccagccccctttgtcgtctcgtctgccacccacgtccccatggcgctgctgctgctgctgctccttgctgcaacctgcaactctgcaaggccaacaagacaagcggaggcagcagtagcaggagggcatatgcctcgtttcccggactctccttccatctcatcccttggttgacccatgggtttgaccatctcaaccgttgattgatcccacatttttttaagcaaaaggtatagtcaatgagtactccctccatcctaaaatatattccatatctcaaaatatgaagaattttaaatagataggacattttctagtactatgaatctggacagactctctgtacaaatttatttaactatcaaatgttccatctgtttaaaatctcttatattttaggatggagaaaaagtaaatagtattgaataagaagaagagagtataaataaacaataattatgtgcgttaaaaaggaggttgtatacaataaacaatagttaattagtatttaataattgaacggttaaacatttaaagacactaaggcaaagatggtactacactaagcttagtatttgcaaatggattaattatgtggactaataagtgtttacactcatatactgccaggacatgagagaggagactgtaatttgtaaatagctgcatgtgtgggtttcttgtcattttgttcatctttctcgtgaagttttttgcgtgaaaaggggaaaactggacgtgccggtataaagtgagccagtactacaattcactgcctatatatgccacgtactcgatccaacctgctacgttgaaaacttttgcgtccatgactcactgcacgttgcttccggcgatgaactatcaagcgtcatatgcattcacgtaagctatatatatatatattattcccttctcctaaaatataaaatattttatataaatgtaatatatttaggatcataaatctgatttgactttctgttaagatttatagtcacacacccacctatttttttttcatattttagtacggatggagtatatgtattggcccacatcaatttaagtcagataatgcatcaggtgtttgcatgcttaattacgaccgttaattgtgacagcggggcatacatggctaccttcaatacgggtcaacatttactgttcacttctttttaaagcccgtttgaatgcgagaaattgtatgtgttcacttcacgtggaagtatgaaataaaatatactaggatacctcctctccggaacgcaaaacgatatttgcattaacatgtgattaattgaatattagctattttttaaaaaaaattgattaatatgattttttaagcaactttcgtatagaaacttttttttaaaaaacgtaccgtttaatagtttgaaaaacgtgcgcacggaaaaccatgatagggagttgggaactcccaacaaagaacgcaccctaattaagtactcttttatattcatcaccatataaagtactttcataaactatacacgaatttctattagtcaatgataaaaaaaattaactggcttaacaccaagtaatttaaacggaagtaatatatatgttttaacttttattaaaggtgactttttatactaatttaagaacgtgttcaacctataacctatacatatatgtatcgttagcaaactcctttttttatgccatacatgacttgtgtgtcgcataaacatccgcgagcacccaatagtacgatgataacactaaattaatattctccccgcttcaaaatttagcaatctatgaactaaattcatagtgttaggttggatctaatctcatacataaattgttatattttgagacgagtaataattaacatatttaaagtactcatctcacacttttcccccgcatgatgcaacgtttaccgacagtttatagcttccaacaaacaaatgagaagatggttgcatttaatttaattagcttgtgtgattggtgagtggtgaccaaacattatgtcatcgatcgatcccatgcatgcatccacgcccaattttttcatatacaccctccgtccctaaatatttaacgtcgttgacttttttatgatatgtttggccgttcgtcttattcaaaagatttaagtaattattaattctttttctatcatttgattaactgttaaattcacttttatgtatatatatatttcacaaaagtttttgaataagacgaatggtcaaatatacttaaaaaaaatcaacggtgtcaaatatttaaggatgaatggagtatatttttctccgatccatggagcacgcgtatagaagttcacaaaacatatggtaactaaaaaaatattcacagcatttttttctgcagggaaatattcacatcattttcacaggccacgtaagaaaagaataatattcgtcgtatgaagtcattataatcttcctttatggatatctagaaggcatatgcatgcatgcattctgcgatattaatatatatatgtaaccggcgctgccggccacgtggttaattagacagttaattagttgatgatgccaggtggtgtttaattactgtggaaaacttctactagacgtctgaatatcttgttgccctgatgataattagtatactgataaatggttttaattaactaggcatcttagtcagcttcacttaagtgcagatcttaaggtagctaggcccagtcatagttccaaactttttttttcaaacttacaacttttccataacataaaaacttttctatacacacataaacttctaacttttccattacatcgttacaatttcaatcaaactttcaattttaaccaaacttttaattttgacgtgaactaaacacagctctagtggggttttttttcttccaaatagctaaatgattgaataatgtatgtgatcactattcgagagcacaaacgaatggattaaacattatgaagttaaagaatagatctaaactagttttgtcgaaattcacatataaaagttttttttctcaaaaatcgtatagtttgggtgcacgtaaaacatgtggcatatattaatcgatcgattaatccttccttagaaaaatgttcaagggtcttccgactagttccacaaggtggtggctagactatctgggttcggagcctcaccccttttaattatttgatattaggttatttcctaatatttgccttttttttattaattcttcctttaaaaaaaagagtaggttgatttaatgctaattgcattgccatgtttatttttttttctttttgtgtggatgacgtcgcacgcgaacacgattcgaaccgaagtccatttttcctgcgcgtgtacatagtatatacgtacgcgtgtagtggacggttgcttttcatctgctttcttcagagaagctctatgtttattatgatacgcatgcacgtcgctcttatatatgtttctataatattatgcgatgattctcaatcatgcatgtttcaatattacctaaccatttcaaaattgaacgcgatctcaattatttaactacatatacgcatgcatgtgtgtatatatatacagtacgtacaccaccggctgcatgccggccaatgatcgatatgatctggacctgcttttgctagcttaatttactcgtatttataattttttttgactgaattatttataattgtttgtaaacactgctccctccattccaaattgatggtacaccaagaccaagaaaagctaataactctctcatattatatttactctagcaacaaacttgatgcatgcatcatccacactattttctagccaatagaaaatcaagatattgcatgtgggttataaatacttgtgtggatgcatgcatcaatgcccatttactccaatgcaccaataacgaatagacttaatgaataaacacaaatatatagatcatttaagaataaccttaaaaaaattatatgcagatcaattttgaatgaagggagtagtatacatgcctcttactacatatttttggatcgatcacttgagaatttatggatggagggcacaagctgcattcacgtacgacaaatgcgatctacacccaatctttgcgcgtaaatttctgatcgatctgcatttaattcactctccatcgaaagttcatttaagagctagctaggggccgaccatcgatccatcccagaagtaattactactctagttattgatctgggcccttcatgcaaggtcgaacccatcaacatgcacgtaatataagctgtgtttagttccacgctaaaattaaaagtttaaagaaattagaacaatacgatggaaaatttgtaaatttgtgtgtaggaaagtttgatatgacggaaaagttgaaagtttgaagaaaaaagttaaaatctaaacatggccatactctacatctaaaaataacacataagattaagtggtgagatgaaaaagagaaatgaggaaaaatatatgtatcacctttaatcatgtaaggggcaatcttcacacaactaaaaaaaagaaaaaaaagtgaattggacaaacaaataaaataaaattattggggttagtgtgctacagtacagaggtaatataaagatgatgtattgtatataccaccttttatagataaaattgaaggtgtcaactacctttgctataaaacttgttcctatattactcgtttaattataattagcatttaactgcgacgctaaaacgcacgcttgcatgcatggtacaatattggtactgcaggagtatatatatgtacgacgcgcatgctacctgcagtatgtacatgtccctcgtctgtgcgttgcacgcaccgttttagaacgcaaggtaatattggtttaactttgatcgatcatatataaacataattaaaaatataaatttcaggtatctgaagaaaaatggatgtatatatagtctaccataacgagagatttcttcatagtattacacttatgtaatttctaaaatttatatcgaagggctagatagtcaaatttttatccccgcaaaaaaaaaggatagtcaaatttatagagtataatgttaacttagaaaagtcacacacggcttgtttatgctaccagaggaaatagctgtataattaattaattaattaattaagcccgacttacgtacgtactctttctataaaagaaacttaattgcaagctattggtcaacaaattagtggtaagggtaggggccgggtgagcagaaaaaaaactgaaccgaaaagaccgagaccgagaaattcgatcctagacagtcaaagaccgatttttttcgatcaatttggttagtctcctcgggtaactgaataaactgaaaagactgaattaaaaaaatgtttaaatgcaacataaaatccactaagttcaataggactagactctaattttttcacatccctacttcttctaagcatgcaacctaacaagagtctttattcatatgtgcttacaatttctttttttgatttttgtgttggcatttttcactatttttttgcatatataaaaatgttgttgaatttcggtcaggaccgagaccgagaccgaatttgtcagtcctgacatttttgcgttgaaattcggtcttcacattccaaagaccgaaatgaccaaaagaccaagactgaaattttcggtcaggttgtatgcccacccctacgtaagggtaagtgcgcccctcacaaatacacataaacacatataccctacatcttaaattatatggtgcaattaacaccaatataaagaccaagaaagaattattatcacctttcgtttggataactccaataaatacaatgcatacacccaatgggattagagattttgagagggtggatgattttgaaaaagaaataattaaagaggagagagatgtgctagtttattgcatcatgcgtgctttatattatgaaacattgaaaaatatggttgtgtcttatattttgggatggagaaagtaagaaaagtaatattgcaaattggtagttaagggatactgagagcaagtactataaggatatatgtgttggtctaaaagtgtcgcataagataagtacttgatgagatctactccagaagaaaagtgatgagagagactatgagctagtcactagttatacaagaggcaatctacatatataatctccaaagaagagcacacaacgaatgtgagatagtgtgaaagtgaacataaggctgtcatgggttggcctaataatgttgattattttcatacagcttattaataaaaacttatttatgagcatcacttttatatatgtcatagcgactttaaaggcaatgcataaaaataaacttttcttttgagatggaaataataaatctcaatagcatcaaaatcaatttcaaaattaaattttacaattcaattttggtaacgatttataagctgtatgataaaagataggtatagtatatgacatggctaaaattaaggtagcacattcactataaaacttgctctcttaatttaggaacacaacttcttccattcccagatcgatcaaggatcaatatataagttgggacaaagttgcaaggctaattaaagtctttttagggtggaatagtaattttgaattttgatttggtggttgttttagttccaccaccagcttgtcataaactatatattccatgctgctagctagctagatttggcctagatcgatagctagcacttgcaaatttattaggtttggagctttgggatcctacgctgatcatagagagatcgatcacttatatataggcactcgctgtcgtgatagatcacatagtcctaacacatgagatcctgtaagattatggagtatcacacaggtcatgccaagttgtagaatcaattaattaacggcggccgtggcgtctgaagaaagaacagctagcagtggtaaaaaaaaaaaagaaatcaaagatatgtgcctgccatgtcatttatcacatgctacgtacaacgtgttggcacatacagtaactgatgagcaattcaagctatgcattagggtgcatttctttttagctaacgattacatgttatcacggacatgtttttttaaaaaagtttataataaacacggtactttttcaatggaatatgagcaatgctagcgcaataaatgaccacacatcaatctagccggaaaaaaaaataaagggtaaatagctaaagtggtcctccaagttttaattatctgaggctcagtttagtccttgacattttaatctatccatattagtccttcaagttttcgttttagttcaaaattatccttgaacttacttagaagccacatggctaaacataaccaacaactctcttgataaatgacacttatactcccctcattcacatatataagagaaaaaattgcatgcaatgatttttttatagataatgcatagtaatttatgtaaaacgaaaataaattatgtacttgcaggtgtatacgatagccattgtttaagtttcatgtgcatatgttgaaataatgggaaatacatctgcaatattgtttatttattttgattttcccttttctaatgtatagttgcatacaaattaagggcaaaacggacattttgcaatggaaatattgactacaaatatccatatggcatattaagtgggcccaaggatgattttaagccaaaacaaatacttagaggacctatgtggataaaataaaacctgaaggaccaaattgtgccttcggtgaaatttgcgggactaaattagctattcacccaaaaataaatgacaaagttacttctagtcaatgtattagtaaattactaatttacccttaataacaaacggatcatatcatttctatcgatagtataatactactagtagaaagcaccggagcatcactcaatattgaattcattcattcatgccatcaaataattgttatgaacaacgcaatttcacaaatcatccatagacactttagagtttagaacgcatcatatccttaggccagattaaccaaaagaacatcaataagcaggactatatatagcaagtactttctgagacgaatattattggtgatcccgggtacccgggtacgtacaaatcagggtgcatgaacgacatagcaaaggcaggactaacaaaaacggaaggcaaatatatatatatatatatatatatatatatatatatatatatatatatatatatatatatatatatatatatatatatatatatatatatatatgcatgcagcagtgtgcattcagatcggaagtggtatataatgtggttgtacgtagggtaagaattaagcgtgcgtggcaataacatcatagctttgtcggcaattgttcgtctcttctcctcacatggaaatcttgagagcagagatcgaatcgatcgtcgaagaacgtacggtcctcaaccaattaataagcacatatatatcgtcttgagatatcgatcgagctggcgactgactagctagtaaaattgtttgaatttttctagacaaactgtattaagtttgatcaagtttataataaaatttagcaacatctaaaatattaaataagtctcattaaatctaacattgaatatattttgacaatatatttattttgtgttgaaaatactactgtaattttattaaatcaaatattttttattagaaaaaagaaaaggtctaacgactttaaaggaaaggaagtactgtatattgttgtacgcatgctagcaagcaaatgcaaggggcagtctggcagtgcatatatgatagcgtaatgatgatttgttcctgcggctccctccgagcactggtgaccagtttaggttatgtttagttcacataaaaattagaaattcgattgaaattgaaacgatgtgacagaaaagttggaagtttgtgtgtatagaaaagtttcgatgggatgaaaaagttagaagttttaaaaaaaagttagaaactaaacaggccttaggagtacatgttggtcaggaggacgcattctgcatttctgcggcaaaatcaatcgtattttccgtcgtggtgacacgtcgcggctcgccggggccgggctacgagcgtgaggtccccgcccgttgcagactcagcccagcccggcacgtacttccaacttgcctcgccgtgcgcggagaagaatagtgggccggcccaacttgtcggtgcaccactgcacctgcacgttcgtgggtatcgcgttacggcccatactgctctcgggctgcctgtctacaatacatgggccaacatcgtcataccagtccacttctgacggtatgagcttttgccgtttctccttgcttcttgcatttcgatgacgacaacgtactctcttcgtctcctactttaatcatttgtcttgcttaaaatactaggcacaaatatatttaaaataagacggacaatcaaaaacttatggttgcacttaaaataggacggagggagtaaatgctgcttgaaacaatgttaaatctagaaagagtcgctcaaaggcatatggtacctgagtttctgcaatcaattcgaattaatcgattcccttcttttgcatttgcacatctgcagctaatagtacaaactgaataataataagtaagaaaacagaaccccagagggctcgtaaactgaactacagaacattgctactacatatctcctgcttccactaagctcccctcgattcagctcacggctaacactttctcatcgcatctccatttctccatccaagctgctacccacaagtatacatctgttctccaatctgatgaaactcacactgaccattcttgtgcagcatcagaattcagaacacactccttttccttcacataagctgtctcccttccctgtcagattcttcgtcttcttcttcttcctccatacgatcatggagcaacgacagctattgcacggttagtagattgtgacaagtgacaacggctaaaaacgatggaatcagctgctctccagtttcatctcttgccgaatctcaagcacttgttgtgttttacttcggtcatgttattgttcgaggacgacggcgccaactggggcgctttggctgtcttatccttggagagcttctccatcgcgttgatgaacttcctcagatgcctgatgtattcagggtacgtctccaggttgcagtggccgccacctttcacccataagggctcgtacttctccttcgcgagctcccatagccgcttgccgtgggagaaatcgacgatgtcgtctgctgtgccctgccattgtcattcagcaggtaagttctgagttctgatcacaccaaccggggaaaaaaaaaacagttgagagcagcaatgaactatctcagaacttaataaagtcttagcatgttttctgttgaactgtaactagtaattggacatgagatatatactgaaaagtaaatttgaagatgatttcagacttgaatatcaatgaaaagctaaggaggctttgaatcagaaatgaaaagggtacaagctactcacatgtataaccagcactggacagtcaacctgctttattttgtcgatgttctgcagacatgttagcagtaaccagattaggatggtaaatgacagtcgttttagaagcaaactgaaatcatggtccagagttccagacataccttgaagatatcaaaccaaagtgttacttttaccggatatagaacccgaatgcctgaaagtatagcactgtgaaggacaacccctcttaatttttccaagcgcgaggctaaatgcaatgttggtccacttccaactgattgtccatacaagattagatcctctggttcaatcccgtacaccttcgttaaacagtcataaacagcctctatgtcacagtatgtgttgtattctgatggcttttgaagcagaaaacatgataagaaaaggaacaaaattaggtatgtcttccacaaggcgaacaattacctagcttaattacttattgtaagttcgtagaaaggaaaacatttactatcgttcgttctgatcatcagaaagaattcgttaatcaacaaaaccatgtgccacatatgggaacaactgaacaagcacacatgccactttatgagctagtactacttaaccaagttcttcaagtagggatcgataatcaatcacctagaagttggggttgatggtcccttggtataacaactttgacaaaaggatgactaacagaacaaagttgccatcatggtcgagaatagcagaaagcatgtgtgactttttccgatattcataatgaaagtaaaattgaaaaaggctaaacagccatttgccaaagtcctattccagatgaggccaagaaagacagaatggctaataataattgctttgagaaaagctgcccatatacctatagaagaacaggatgttgattatgaaaaaagcaagggaaacaatccaatccaaagattgtcgcttgagtcattgatgaaaatatggcataaacatacaggagacatcatgatcacaaaaaagtttaggtgacaatctattcaaagaagacaagtttactgcaaattaacctaagaatcaagtttgagctcttaaaatcactgaggaattcagaatcttactttgcctgtagaggccccatatcctgaataatcatagctgcagaacgaaaccaagtaaaaagttcagtcacatgtaacacacaatattggtcatgtccatcaaaggaaaattgtcatgatattaatttgacacaattgtccatgttttatatatttattgatggaaataaatttcaaatcccatgaggatcaaatagcaacttttccagtaggggaaattctttcgttcttaaagttaaaaggcaggcatcaactggatccccaaaaggtgaaatagataccatttgaatgtgaagttcgacaggactccatccgaaataatttatagcagaattattcatgatacatttttactctatccacacagcaagactatatgcaaattatcaatccacgatccaaatgccacaaacagttataacagtattataagaataagatgccaagcactattctcttacaaaaatgatgctctgtaatccttgtatattttaagagaactgcaacaaacaatgccgtaaaatttttttaccccagttccccaatctagagaaatgccacaattctaacaaatgactagaatcgctgaaactgaattcgaaagcaatagcagcagatcacacacagcagcatgcatctgcattggagcagaatctgacagtataaagtacaatgaatcatccaaaaaaaagtacagtcttaacctcgtcggatggcaacctggcaagaactaaaatctaaaacggagggaagaaacgatctgtttttcaactcttccataattgtggtcaggccatcaggatatccaagaaactaaatctaaacataaaagcagaagtcaaagcatttattcaggaaaggagtggtcgtcatttaatcaaacgagcagttcgttcctaacattgaaggtgaagcttaatcaggtgcgaattcaacccctcaaagaaggtttaacaagaacaatggaaagaaaaaagcaaaatcttttgcattgcaggtcaattaacaattctgaacgccatgacattactgttcaacacagttggctcaccaactaaaaaaagatcgaatcaaatcctctttcaaattaaagcgaggaaaaaaaaacataacgaagtgcccgccaaatcggagcttgcaaaacggagtatttacaaaattgatcctaaatcataagactaattgaaagtttgatactgattaggcatgaagagtagagccatagagcgcagcatatctagcaggcaagaacacaacaaatgcaaaggcatataatgaaatgcaaatgcaaatgcaggttcagaagttggaagtggaagcaagaaaagaacaaggcgagcaatggaggagaggagaggagagagggtgacctcatgatgttgacgcggaggtgggcgcggagctcgaggaagaggccgagcatctggccgaggtcggcggcgttgccgtgggagtagagcagcgtgaggcgcgcggaggggtggcgccagaaggcggcgacgacgcgcgtccctcccttggtcggcagcgcgtgcacctccacgccggcgtccgccgacacccccgtcatcctcaccacccctcctccgccgccgccctcctccgccaccagctcgtacgtgggtggctccggcgggaagaaggccagcctcgccgccaccgacgacgtcacgttccccattagctccccctccccgcccgcctatctcgctccgcaacgtgaggccgccttctcctcctcctcctccttttcttgatttcttccctcgtcaagaaaaagaggtgaggtggtggtgtgtgttgcttttctcgggctccttacctaagcttgcttttcctcctctctctcgcgcgcgcgcaatgactctggtggattcgggtagcagttgcagtcggggggttggtttctttggttggttgcgcggcgggggcgtagcgtaggcgtacgtacgcttgtcgatcgatcggcgacgacgacgacaggttgacgaccaccacgtcgcgtgtgtgcgcgcttccgtcttcgtttagtactactcccacacgttttttataaaaaaaacagtctaatactaaacatatcttaataagttgtgttttcctgaaaaaagttggaggtttggagaaagttgggagttaaaaaaaaagttagaagtttactccctctgtccaaaaaaaagacaaaccctaggtttctatgtccaacgtttgactgttcgtcttatttgaaaaaattatgaaaaaaattaaaaagacaagtcacacataaaatattaatcatgttttatcatctaataacaatgaaaatactaattataaaaaaaaattcatataagatgtttttgggacggagggagtatgtgtgtataaaagttatatgggttactgtagcacttatgactaattatggactaattaggctcaaaaagatccgtctcgcgatttacatgcaaactgtgtaattaatttttctttttatctatatttaatacttcatacatatgtccaaagacttgatgtgatatttttggaaaagttttttgtaactgaactggcccttagcaatgttttagtagccacgcacgaaaaattgtgagacgtctcggatactcacccaaggaggcaacaggacggagtattattacaccatccgttccaaaataaatttatttataaatttgtgtgtctaacgtttgattacctgtcatatttaaatcttttttataatttggcatttttattgttattatgtgataaaatatatataatcctttatgcgtgacttaattttttaatttttttaaatgagatagacggtcaaacgttagacataaaacctacaaataaactaatttttggacgaagggtgtactattatagatttaaaaatttattttttaaaaaatgagttttatatagattattttaaaagaaaatgtattgtttaatagtttacaaaacgtgctcccggtaaacaagtgggtagtaaaatcgaaactcactttcaaactcagtgttagatttacatttagcactggcattaaacaccaaaagtagctaaattggttggttagtgttgttttttatgtgaaattctcgaggattttggtgttagcttatgcgtttaaaaatgatcgtgcaaataactatcggctcatccgaatagcagcagtacggtcgctcgcacggatcggatgcattacctgaccaatcaacagtacagatattagggaaaggaagacgttgtacctgcatataggtgactcaataactgatgttcagttagctataataaatgcgtggaagagccaaagagggtaagctgaggcttgtttagagcaagtttaataatacagtggttcaaattatctatagctaatctaatagtctattcagataatagctaactataaaaatatactacaccgttaatacacgattctacccctcatacacacgtaacgtcttagagtttttgttacaattagttataaatctacaggccgatttattctctcttttcttttttcttttcgatatatgattatagctagtttatagccttttattgtaccgctcttaggtggtcaagattcggtcaaaagcagcggcagagcaaagaaaggatgatggagaagaactcgcagcggtgactggtcgatcagacggcgaagatagactgatgcatgcctctccctgcagctgtatacagtatgcttccgtccattctaaaatataataacttttatcccttagtatttatcctaaaatataataacaactctccaccaatattctcttcccaaccaatcacaatcattcatcatttatttttttccacctacctctactaatcatcaatcacaaacctccaccactcacttctacctactttcttaataatcgtgtccaactctaaaacttattatattcttggacggaggggtagcagactataaatcagctaaatacatatcgagaagataaaaaaaagagagaagaacaacgtggcaacagatttataacgaggtctattgagatatgttgtactagaatatgttctatcccatcttaggttgtgtttttgggacgaaaaaagtatatatttatagataattattgtataaattagttattaaattgagtatagatgatttaaagttagttggctataccattgggtgagactgcgagttgagcgagtgaggcactgtttccctggccccacattggctgtcttcatccgacagctgccagccctcgaagtcctcactgatctctctctatacttcttccagcatttctgcttgatcatcatcagcagctgcattgcctggcctactagtagtagtattgctattgctcaattgttatcgagactgttagagactgtttaatctgacgaaaggatagatatatttcgcttaatctgatgattaatcatgtgctgcacactctatgctatggagtagtagtactcgctgggcagaacattctccttgcgcgtcttttgaagcctctgccgctggaatgattggatggaaaagaaagaaaattatgcgtgcacaatgagagccgaggcagccatcggctgtctcgcccatggacaagaaaaggtcactagtggccattgcgttgcaatgacacgaatcaacgaacagctttgagtccaatccaaaaacacatttagttttggtacgaatcaacaaacgcttcgtcgctatgcatccatccatgcaacacactgctgttcctatggccatactccatccgtccaaaaaaaagacccgatccatttcaactagtgtcacaatcaattatttcatttctattggagcattggcctagtagcctcctcctcttttgttactacaagaatgtccctttacttccatagaaaaggttaattaagttttcttttcttttctatcgctgactataattagcacatactccttctgttttaaaataaaccaacttatacatatgattttggataaatcaactatgaatctaaatatccgtatgtaaaagttgattttttttactagagtatctctttcttttaacaatcaagataaacgccacacaacagctagcatggactcatatgaagaaggtgaagatggttaattagaggtagaaaagatcaagcacaagggtaacacaataaaccaactgctccaaatctctctttttgtccctgaccagattagtgaattgccttttgtcaacagtgacgttagctggatctgatcatgaatactctctccccaactgtactgttgataaatatgggaattgggcaatgtggtcaagcaaagggaccatcagttcatcattctcttttgcatttctttatcaggtgggacccacacccaaagctccaccccgggaccacatgcagctcttcctttcatgagggctgatgcggtcaaagggtgaaagggggacggtcaacgggagattaccactacctggatgcatgtgggcataatgatagtagtactagtaattaagagttaattatccatatgcacatatagcagctaagcttagcctcaaaccttggagtgcgaaacactgtaaccaaatccattggaacgtgaccggcacatgcaatgagtgcctaaattagaaaggagcacggcttggaaaagttagtgctcacatcattgtatatttgtaccaacagattgtgtaaatacaaagcgtacaatatcataaaagccacatgaaaataaaagagatgatctagatatacgaaattgattgttcctttccccccaaaaaaaaaaagaaattgattgttccttaccaagggtatttgttagagataaaactttatagtggagtataatcttgtagcaactcatatggaccattaagatcaaaatatggagactcagattatatgacagtccttataactgcatttgatgtaaatcgagagatgtactgtggtagttcctgttatttataacagtcttttctagcttgttccttgtagattttttttcctaataatatactccctccgtttctaaatatttgacaccgttgactttttagcacatcaccgttcgtcttattcaaaaacttttatgaaatatgtaaaactatatgtatacatataagtatatttaacaataaatcaaatgataggaaaaaaataattacttaaattttttaataagacgaacggtcaaacatatttaaaaaagtcaactgggtaaatatttagaaacagatagagtattaaagtacaaagcttttatgcactcaaaaaaaataaccacacttgatctcaatattgagcgagggtcctcccagtactgcagaggatctggatttctcaatatcgagagtcaaatattcgcattcgtatgggccatagagctgagacttgagagaaggaaaacgtgtggaggaaaagtccgaaaatcccatgcttgtgtcctgctatctcgactgggagcacaagcagagacgacgcgaaggctgacatgtgaagtacttctactaggagtactactcgcacaggtctgggcggcaagcaaccgaggcaggaggagccgtacgagtcagcagtcatcatcagccagcgtggcgtcgcattggattcgcttccttcttctgctcccttctcctgccccaaaacgtcgcaacgaataacgatgcccctcggatctgcctgcacccgagtactcctgtgtactctatccattccaaaataaaagaaaaacatgtccaggcactcgatattccagatagcatcatcttatcttagatttgattattttaaaacggtgagagtagtccagtactgctgctgctgctaattggatttttatctgaatatggaagacatattcagatttgttattctaaatatcatcacatcttgttttaggttatcctaagttaatttattttgagacggagagagtagcccagactgtccggtactgctaccgctgctgctaatgttgatttttatctgggagcaaatgaggtctcgttgagttctaggaataaacaacaattcatttgctactttgcttagcttaaacagcaggtcatgcggctcacgcccggtcgaggatatgcgtggcaattcttgctttgtattggtagaaatcatcatcatcttatgtacatcggtgaggattacatgtaccgtgtctaatgtcatgtgcaacagtgtaagcctaattaagcagaggttaatatgtacatggggacgccatctcttaccagatggacggagcagaggagaggcgggctacttccacaccttgacggcgccgtctctgcttcccgagatgagcctgtggctcgacaagttcacggaggccagcgcgaggatcgcgtctcggtggcaccccgcggaatccgcggcggccatggcgagctgcgtcttgtgggttagcctcgacgccgtcgtgggctgtctgcatatttcctgcacacagaagcaagcaagcaaacacactctaatcaggttcaagatttgcagatggggaagaatgtggcacaaaccaataatcatgaagagagatttgacattgatcaatcgaaagttaaaactgaaagatacagcacagaacagcatagatgtagcagaaaaattcatattttacgactagttacctgcacaacttgtacacaagagctggatcttatatcgtacgtctcgtcgtttccagctcctttcaccgagggaccggctatacagaagctttgctcaggccttcaaaaacatcaaaggaaaacgctagttttatatgacaggcacctcaggagattttttttttgcaaaatcagtagtagtatggtacaaatactgaacctggcctgatcccagtagcgtatcttcaagtccgttcctccggtcaataggtcccctcctggcaaaggaagcaaagagcggatgcctggaaggcgtggaggcgggtcacataattcttcaattcggtaattataattcgctggccgggtctcatctctggtatttggatgtattgatggtgcctttggtacaacagcttcattctcagtacttgctgttctaaatatctgcatagttcatcaaatttacagggcatgagtagagtcgtcaagtgactgcacttgatagattagaggtgttcacttcatttttctcaaaaaaaacactgactcttatagaagactaactaattacaaatgtgagtaaacaaggtattttatcaactgtgacagctcaggaaacaccaagcagaaagccatatgttacctggtgacggcttccattctcagcatcccatagggtaacttcattgcagcctgcagcaacaaaaaccacaggtctcccggaagaagaaattgaattcggtggtggtataaacaagcacaatttctctataggggttgctggcaaatatttccatgagttaacgggaagcaaaaacctattatcccacaacgtaagaacgcctcttgaagacccagagatgaaccaattcccgcactggcccactacaagtgccgatacatagccctcctctggtgaagatctaaatgaccaagactcagcattggtccttgtatcccatttatgtatgccacaatgttcagtgctgaaaagaatggttgggctaaaactctctgtggaacagttcacaacactgagaattgcaccttctttcaaatctttcctttttacatcaacaatgccagaatacctttcgatgacactccctacaccacgtgcgcagtcaacagaaaacaagtgcaatgttccatcactagcaccaacaataacttggggagtaccatgaagcattgtcgtacatagagctcggctactaccgaggctatatgttaacctagatctgaaggcaatgtccttttccaattttcttgtatcccatatcttgacacttgagtcatctgaagctgttacgaaaaaggtattgtcggttgatacagcaatatcattgacagataagcgatgctcctgaagatgtgccaccagaactccacggggtttccaacttgtctccagagacaatgctggtctggtgaacgatcctgaattatcagagttggaaatgatatcacctggtatagacgagctgctattcattgagtcactgatgctcccatctcggtgcatgttactgaaatgattttctctagtacgtatgcctggaactgaacttgataaactcccatgccggtcagatcccaaatttgcatgtagtgctgtcccttgcatggagtataatggtattcctttaggtacgccatcataaaaggaactagatccatgtactgcagagcttatatatgctgaactagcagaagaaaaatctttaatgttcaaagacacatcattggacatcttaggtcctctcaaccttgaatcatcttcaatcatgattgatgaaccactttgtaccatggcaggataccttcctccatgcactgtcaattcttttttaccatcacccttcagtaaaatgtctcctgcatcatggacatcctctaaagcttggtacaagactaattttgagaccggaggcttaatacatgaaagaagagcagtttctgatgacaatgatggtggctccctgtgtaaaaaatgcttaagatgtggaaaaaggtatacaaaggtgtctacaggccctatgctctcactgcaagcaacaacaaatcttacagcggaccgtttaacccattggactggatgacacagcaagggaagagcctttccaaataggccaacaatcgcccttttcctcaaataaccacttttgcacatcatagtcaagcagtcaagtactttcacaagcacaacctccatttcatcacttagtgcctgttcaagatagggcaagagatactcctcgacacttctggaaccaataaaatagcacacaacaacaatctgaccaaaataaactgcacggagctgctcatcacggtcatttagaaatgctggaagtatgggaagaagaaagtcgttagtttgtctatgtccgaagaagtaacacaggtaacctatatcttgcagaagagctctgcggacattaggtgtctgtttctgtcccattaccaactcttgcactatttcataaatagattttctgagtcgtgcaagttgaccattaatgctatcttgctgcctctttactggtgattctacagactgtgatctgggagctaccattgattcatctagaggcctagcatcctctatactccgagaacgaagcaggaatctgtaggctgtcaaggccaacttataaatgttgctggcatagcaaaccctaacactctcctctgtatcatctgggagcaaagagagcattggaaggatgtactctgggaatatctttgcatcactgataggaaagtcttgaataagacaaagaacatcagatagagtttccaaagcagcacagcggactatggcagctggatctgaaagcatcgcaataacatatggaataaccagctgtaagcgactatcatcatctatgtatgtagaacaaatcttcagaagtatgagactagcccttctaagctctggctttttgacacttcgtatgcatgagcaaagtaatgaggcaagcaaaaccatgccttcacagctcaccttgtactctgtttgttggaaaatgtcaaaattataggtatctgattgagcatcataactagacactaacgcaagtaggttactctttgagatcttctgcaaatgtgatacacaattgttctggcccatcaaaccactttcagttcttccagcttgacaaacctgctgcaaggactgaataccatttgcatgggaaacattgggagtaacagaccggtctctgtcttgtgtgatctttgtacttgtacggtcgtccttctccagttccttgaggaggaaattgagatctccaacaatatgcttatgctgtgcaggactgtttatcttaactacaggtacacttttggcatattcttttggtgaatttacagtttgccctccgatgcccattttcccagacagttcattatgcacaggcacagtagcagatccttgaattttctcgagtgttgagccacttatcattatatcatgcatcttttcaaaatattcttgagtcttctcgacctgtcaaaaggcatgtatgtttggatatccatggtcaagaataacaaagtagaagtttaacatagatgtaattgatccttaccctagcatctgagtgaagcggaacaatatctgagaaaaatttgtggagaaatttcgaaaaataaaccgggaatacaacagattcatatttttgcaagtagtttttgcatgatagcctttctttcgggtctaactgaatcatgtgaagtaccatgtcacggataccagtatcttgtatctgcaagcacaaatggataatgagccatttttctttatgcattatctaatgttccactccatgacccaggaagatattacaatgttgcaagataagaacagaatagccaagagactacattgctttgtatgtgttttttcacctcctgactattaggcaagaaaactgatggaataaaggacaaggcataactaatagctggaccaataaccagaattatttgtgcaacacaaaaggaacaaggaacaataccagaaaccttttcaagggtatgaatagggtcgtactgaccacgccgataagctagaagttgtgaaagctcaaaaagtggctgaccttctaggaaaagttcagcaagaacacacctgtaaagaagacaagccatttaccatttggagaataaggaaacgaaaaatacagcctcagtaaacaagtctaacatagcaaagtaccacataaaagttggagctattaaagaaaaaagattaattttcttaaccaagggtcctaccgtcctagcaaacaatcatgcaccgatttccttttgggatgtgcaaatattttaatgtagacagcaaaacatactgagggtaggtctctcaattataccgtcagttcgttttacttctaactgagcattcctcaatgcgatcaagtgaatttgtaccaaccatgcagcctcaaattgatcaaaattatgttccaaaaagacaatcaaaattattttcaaacgctaacccagcctaaatgttaaatttcgtatttcagttaagggcgtgtctcaaatgacaagataccaagtggagaaaaaaacacattggtaacaatggcatatattgacaacaaagaacactttgtgcattgtctatcagcaattatcagatttcatgggacaggaaaaatatgatatatgatttccctctttgtcaagtgagatgccaaatgataacacatccaatgaaattaaattataaaactggcatgttcaagcaaaaggcaactgtgaccaaactattagtataagggattgaaaggtcctatactcgtgaccaaatcgataaagatttataagaagaaaattacccaagagagaatatatccatagatcgttgcaaaggtgcatctgctgcgacttgggtttccgcaccatgctcatagaatctctggaaacattgagttaggtttattcaaaagagttgtaggtaatcaaagatatagcattaagacatccaacagtgcattgcaaaaatgcaaagactgactataaatcataatgtgttttcatattcccaaccaggatgactacatatgttattacatctttggtaataatgaaagaatccaaatctcctagaaaatagcaatagtttatttgtgaaatgatcaagtgaatgtagttttcaacccatatggagatggcaatatactttcaaaaatcaactgcatgtaaacccaatcattgtaaataaaatggaaaaaccattgacgaactgccctgacactatacatgttactctagactaacaaattagtacataattgtattaacaggtttcgaatttgtgcatctgcagtactgcaactacaattttccccgtaattcaatcataatcctttagctcaaacaagagttccccatgtagatttcattttgttgatcgtaaatcagagaaagcaattgccaaaactttaaacagaagtctgcgttatctgcagctcctaaaggaattctttttaaaaatgaatgcactaaaatatagtagcaccaaaagctgaaacatcacaatggtgagagaagggtgtaactaaagatcctaacagcagccagtctaaacatcacttattgagtagttgtttaaatgaataacaatttgcaggaacaagcaatatacagaagaccataacaatattagtgataagggtgaaaactatgcctatgagaacaaataaattgggatatcatcgacaaaagagcataacactttcaaatataattcagattaaagaactaacctcaggtgctaggtagcatcttcgccttccaccagtatcaaagaagaacgaaaaatcagatggatcatcatccgggatgtaagttggtttgaaagatgcaaagtccgcaagatatagccaattccaggaggtaacaagaacattctcacattttatgtcacctaacaagaaaactcagtgtaaacatcaatagacaaaaaaaaaatactgctgatgcacagtaaacccttctcaccatgacaaatccccttactatggctctgctccacagcatggattaactgcacaaccaaatgagctatgttggtaaccatatctggaatggaaagagaataatgactcttacatgttccactagttttaagtgcgtgactcatagctatacaatttctaacagtcaccataggatctgatcattaactctgtaaatgcaaatgattatccagtaacaaccataaaaaggatggctcacctgaaaagcaagccatttcttctcaattttactgaggaaaggccgtgtgcttagtcgatcatgcaggttgctgtagaaatactgcctaaggagatacgctgccttatccgtttgcaaccaaacctgaagacatgggatgtcatgtcagcatatgttacccaaaaataataggagggcatatatttacaatagacgtagataactatgttcacatcctgatggatgcaacaaccgctaaatttcactatttcatacaactatctagtgtgaaaatattacgagggcatgagcatattcctaactccattagaatttaatcaaccatagaaatcgatatcatactctagaaacccctaatggtatggcttgaaaagccctaatgacagtttaccaaaggaaacaaccttttactgcctgatctgaaatttccacctaaaccccacacagagtaaatacgcattatttttctgaatgaaaactacagtctaatccaccaaatacccttatgcaacataacaatgcgctaaagtcccacgaccgattgcgctagttcgtaaagcacgggcaaaattcgatggataccacagcacgcaatcctcacctggaagggccagacgtgggatccctccaacccctcgaaggcgttcctaatccgctccagcctccgctcatgctcctgccaaaaccagcacccacagatctcaaaacgcgatttccaaaccccaaatcgagggggggacgggggcagagtgaagggcgcgcgagccgcgaagcctgccgaattttcttaccttgaggtcgaggggctcgccggcgcgcttgaagtagaccttgacgaggagcagcccctcgtcgtgcttgcagcggacggacttgaggaagcggccgcggctgacgacctcgacgagcacgaggttgtacgtggacgggaggtcgtggaggtagtactccgtcgccgacgcctgcgtcgtcttggcgatcttgttccccatcctcctccggcgccgccgccgctcgccgccgggctcctcgcgctcgctctgctgtgcttagtttttgggtttcgatttcgagggaggtgtgcggcgtcgttgcgtttgcgtggtgcgtctgcgatcggaacccggtgcgagtgccaccgcgtcacggagcggggacggagaaccaaacaagcaaacccaatactaatccgaattgcacgcacgcaacagaatgcagttcgagcacaacacgattaacaatatatggctgtgtttagattctaatttttttttcaagcttctaattttttttatcacgttaaatattcaaacatatatatgaagcattaaatgtggacaaaaaaaatatcaattacacagtttgcatgtagattgtaaaacgaatctttttagcctaattacgccatgattagacatacgtgctacagtaactaatgatggattaattaggctcaaaagattcgtctcgtagtttacagtcgaaatctgtaatttgttttgttattgatctacgtttaatacttcaaatgtgtgttcgtatatgttaaaaaaaaattggctcgaacgaaacacgacctatgtctaagttatatatccctcatttcatatcgtataagtagaccaaacttggttaagtttaactaaacttatagaaaaaattagcaacatttaaaattatcaaatttagcaacagaatagagttcgagcacagcacgattaacattaatatgtcaaagttatatacaagtataatgtaattgtaatatatttatttatatttgaaaaattgttaagagaagatttgtagacaaatttatagtaaaaccaaaaaaatctgaacaaactatcaagcttcttttttccctttttttcacggttaagttattgttgatgttttatattaaaaaaagaaaatgtccacttcaccaactaacctaaactaccaaggcaacgagaacagggaaaccaagcacgacactcaaccaacgccattcaccacaggaacaagcagctagaaaaaaaagagactctcgcacactgaagacatgatgttatcattatcacaccatcaccctcgtgatcgggtgactccaccttcgttgggaaacatcagtgtaagggtaacaacctagcctgcatcaaatcatagcttaaataggctcatgttatcgttaccacacgtcatgccccgctgatgctatagctccaacttcacaactaccaaactcactgatgtactgttgagccagtctaacgtacattacagatgataagctttgaagccccacacaagagcgaaaacacaatcggtgaagtctaacttatgaaaaatgactaaagaaaaaggagtgagttgatcaaacggtgttcatactatacaacatagtatgtcagtagatattaggccttgtttggatcatctggtctattaaatagctctccggaatcttgctatttaggagtattaaatgtagattactgacaaagctaattccataacccctaggctattttgcgaaacaaatctaacgaggtatattaattcatgatcgcggatgatactgtagcatcactgtagcaaatcatggattaatataccttgttagattcgcctcgcaaaataccccaggggttatggaataggttttgtcagtaatcgacgtttaatacttctaaataacaagattccggagagctatttaatagcccggaggatccaaacaggatatgagaaagaatcttcacttctattcaaacattctgagattttattggttagtcaacaggatcacaataaaggacgcctgtgaagagcaactgaaatgattatttactctgtttagcattataagccgttttgtgttttgaataatacatgcatgcatccttgtatgtgtttttttagacgcaaaaggtagagagactctaccttattaccattgcattaatggtggtcattaagtaacaaagccggtggctggcaagagattataaggggggaacaaagaggaaggataaagaaaaaagaaagatagaaaaaaaaaggaagggtgaagaagaagaagaagaagaataaaacgatacacaaaaataaaagaaaacctagctaagtttgtctgcccaagtgttgatgttctcgcgaaggctgggctttaggcgatgaacccacaactggagactttctcttatttgaagcaggatgtacgtaacgcttgattcagttagcttgaagatcagctagttgtgtgccttccaaagaccgtgcgaacaagctgcaaagcacgcaggccatcccagtttctggtgttctggcaaggtatccaggattgattccacgaaatcttgtatgttagagctgcgcacggctggctcatagaggttgagcttcttccagacttctcctgctaatttgcaatgaagaatgatgtgatttgctgtttcaatagctgggcaagagatacattagtggagaaaccatctcacaatagtcccagttctattaaaaactgggactaaaaaacgatttttaatcccggttaaaaaatttttgatcgactaaagatgatttttagtcccggtttatcccatgtcagatgtatggcagggggtcgaggatctttagtcccggttgatactaccaacactttagatcgatctttagtgccggttggagttatcaaccggaagtaaatatttctctcccacatctgatcggttaagtcccagacagatatttagataagattagaacatcccctctcttcctcttctcagatccaatcctcttcctcctctccttcctcttctcctcctcctcccctctcctctctcccatcagccggcccttcctcctcctcccctctactccctcttccatcagccgggcgggcggcggcgacgcgaccgcgaagagggaggaggcggcgggcaggaggccggcggcggcgggtggcggcggcgggcaggcggccgggccccggctcatttgcttttttttatataatttgtatttcactggatgtatatttttttttagattttatgattcattgcattgcatggatctgagatgtataatttgtataatctgtgatgtatttaatttgtgtgtagtcttttaggatttgtgatgtatttgatctgtgtataagtaacttaatatttggaatgttgatttggggatgtgcatcccattcaattcgggagaaaatatatggattaacactagccattagcaaatcaacagtaaaataaaaaaaaaaggatctcgaggaactgtcgattcacctcaccaaccggaactaaagattccccctctttagtcccggttggtaacctctttactcccggttggtgttaccaaccgggactaaagagattcgtagtctcggttgaaaaaccgggattacaaagggttctaaatcgggagtaaagagtatttctccaccagtgatacagtgtgggttggaatcccatttttccttgtatgtgtttcacacgtgtctaaatttatactcctgtgtgttagggaatctagataggtaatggatcataaggtaaaacgtaaaacggagggagtaatacatactcttattgtgaaacagagtaaattagttttcttcctcgtacactccgagaggtgaggcaagcatggatacataaaaggcatattcgtcatttttgcgtaaccttacagtcctgctcatggtcatgttgcagcacgataggtagtttggtacatgatcttcctgagatgtaaataacttgtaatgtacggagtaaataacttgcatatcatatgtaccattacaactcatgtctgtaaaaacatcctcaggtgagtcaggtcctgccgatcgatgctccagtagctcactttgccttcaaagcaacagaaagtgcgctctctgataataataagttgatgataccccatgcgttgctgcgggatatttgaataactttagtaaaaatataaatttataaactttgaacatgttgcattagcgttgttttttttgaaaaaaagaaaaaatgatatattgtgtaatcataataaaagaaaagctaaacaacaaaatagttatgaatccaattaatccataaatcaccaagaacaaaaaaaaatgatggtctatgatgatgtcgttcatgatttactccttgatcgatgaacaaaataggcaagacgtagctgaggagacccatactttatgaattatggttgatcatcacataaaagaactctataacaaatagttcaaatgaaaaaaaaaagctatcatcaaggtaattcacatataattttaggggatcaccaagtgaatagaatcagctacagtgtaaaatataaagacataacaaactacaataacatgatttttgatcaacagtgctacatacctgcaccaaaattatgccaaataatccaaaaggcttcacacagtgacagtcattagcaatgcagttgctggccggacatgagctgcatagtggcaaacctgcaatagtggcaattgagacaaaacaccaatctaatatctgtaaagcacggctatgtgcgaggcaaaggctggtattttattctattatatctaaaaatatatctgtaaagcaaccaacaatgaaaaatataaccaatgcaatacagtgtgtgttgacagaggaagatacctgctgccgtgcatgtgacagagtcattatctaacctgaagaaacaaaacaggacatgccaatactattccctttacgctagtgttatatatacaacatggcttctcgatcgacagtttccttgataattgtgtggatcagtggataacatcgctcgattttatagacatgaagcagcagaaattgaaggcttgataggaaatgtatagttagcaattgaaaaaaaaacagacgggaattcatgtaatcctccatggaataaacctgcaaagaaagtgaagtaatccaaagaagagattgaaaggagtgactttccactggcacaaatagtgctccaagggagagataaaaaaatagagagaaagaaaaggatgaaggtattaggaccattaaaaagtaaaaacatggatgaaggtattacaaactattcgaaaaatggcccaatttgcatcatatagattataaagagagacttacatatttagctggactgaggatgaacctacaataatggatatcatggcatggaaagaaacaacctcctccagtcctcgtagtcatccaggaagcagcagcatcaaccttcatacccacttctcttcttgaatcataattagcagaacaactcgcgtacgtgtcgttatataaaagaagatgagaagggaggagacgttccaataatgcaagcggtggttattggaaggtgaagattaaaaggcagaagtggggcagccagcgacccttcgctccctaccgcgggaggggctggactgggccgatcgagtactatagaactgagcagggcaggaaggacggcaaaaacaatctgatctgttaaagcagagcgatccaatggacgggaatagacagtgacgtggcaaagcgagagagcaggaaaatagatttagtggggatgacttgtataggtatataggatactcaattaaaccttcttatacttcacgcctataaaggtaaaaggtagaaaatatgctttaacgcctcaatttttgggacattagaatctattttagtaaaaaccttgattttaaaattttagatctttgtaagaatgtaagtgccaaaatctcagttaaaatttcgaaacaattacccctatccaaattcaaatccatgaattcggatttcttttccaggttcattttacaattcctccgaatcccaagtccttaaatatctacacacaaaaaaaaactctcccctaaactcctagatcaaatttaaaactttgatttgaagctctccattgaaatgccctctctttcttttcctcaaattcataccaatattcaagtctcttccaaaaatatccaagtattggtatttcagcccttctataaaatatttagaatttcatgagaacaaaatataaaattttgaatcaaatccccgtttcaaatctttcaattatccttcaaacaattcttggaaaaatctcaacattcactattcattcgggccgctcttttccttttctcccggaccggcccgctctctctctctctctctgtgtgtgtgtgtcttaactgggccaataataatttgctgggcccgtagttagtttgcccactgggatggatggtcaagatgtggccgtttcgaacggactgatatgatgatttcttcaccctcaagaagtattcctatactgtatagggggtcgtatactaccgtataactactagatgttgctatatagttactcctcctctcacccatctccccactcgatacacactttgtttacatctaaatttggcacctaagattaaaataggaaatattgccaaaatttggaagtctaccggttcctccgaagtgggccggtctgaccgccgtatgttgggcggtcagaccgccggttgagggccggtcagaccggcggtgtgtggccagtctgaccggcaggtccgagtccgactctgtttcgtcgggtctcgaagtttccttgctcaggaagacatgtttcgggtttcctttggtttctaccccgagttggacgtggaggagggcctatagagggcaagaccaacccctatataagggacatggccggttcattgtaagaaaccaatctacaatcaatcaatcgaatcgttttttatattgcttttagttttctcttagtttgtccatctttatcggtttgcaccgtaaaccgtccgtcgccgctgcgagagtgcgacatctctttgtcggtttgtcctgaaaaccttccgtttttcccacgagacgggtagctatctagaaatcggctccgctagccggtttagttatcaaaacccatctaggtttagctctttgctagatcgaggtggttggcgactctaggatcaccgcaaggtttaagatgctgcgatcgtgcttgtcaacttgtcaaaaaagttgccaacacgatttttggcgactccgctggggaggagatccgttcatcgtcaactcaacttcgatttcgccatgacgaagccgccatccaagacggaggtggagccatctaatgtgatgccagtcacattggatgacttcgaaggagaagatcgcaaagctatggaggaatacatcaatgagctcacacgggaggcgttgatgagagcaactactaggactcgtcaaggcatgatcatcaagcccgggccacgtcccaagctcactcccgacgtggtaagtaatgacgaggtatcacaatctatccaacaacaaattgcatctacaatagattcatctatggctaattttaaagatagattagatgtaatgtttaaggataaagttgatggttttttaaggagtaggctcgattcttttatggatgattacacattaaaggataaagcctataccactgttgatcaacctcctatagatccaatgggtagtaaaaccgacggaacggcgttcacggtcggtccgaccgggcctgacggccggtcagaccgcaacatagccgtcgatctgaccgtccagacggccggtcagaccgggtattaccccggcggtcagaccctgggccagtcagaccggcacaatcgtcccaattcaggctatagatccaatgactaatgctagttatttgtatcactttaaaacatttgatcctcctgtatctactgccaccactaatcctcaagttcccccacatattcctaatgcttataatgatgtttctagaggctatcctcccgatactatgcaaggccaatataatcatattgcgccacaaacacatcctattaggccaccaaacccaccgccaaatccacaagggcctaataacatggaggatatgattagtgatattatgaggaatagattcgggattgaaactaggaatcatgctagagcttacaaaaagccatatcctgattattatgataatgtgtcgtttcctcgaaattatagagttcccgaatttgccaagtttagtggtgaggatggtaagaccacatgggagcatgtaggtcaatttttagtgcaatgtagtgaggctaatagtgatacttttaaattgcgcttgttttctttatctttatccggtaatgcttttacatggtttacttctttaccggcaaattctattcatacttgggctcaattagaagaacaatttcatgattatttctatactggggaaactgagcttaggttatgtgacttgacatcggttaagcaaaagtataatgaatatgtcattgattatattaagagatttagagatgttagaaaccgatgttatactttgaatataactgatagagatttggccggtcttgcttttaatggtttagttgctcctcttagaaaaaaactagacggccaacaatttcttgatgttagtcaactcatgcaaagggctctggctcaagaaagccgggctaaggataataaaaaatttgctagaccatttgacaaaaagcctaatgttaatgtagttgattaccctgaggctagtgatagtgaggaggagggtgatcatgatatttatgttgccgaatggtcgtggaataataaaaataagccttttgtttgctctaacttaatgccgactcctcgcaaagatcggcaaagtgaggttaagtatagttttgacgtggccaagtgtgataagatttttgattaccttttgcaagaaaaacaaattagattacctaaaggccatgtcataccatcgcaagaagagttgaagcgtcgagcatattgtaaatggcatgattctcattctcactctactaatgattgcaatgtgtttcgacgacaggttcaatcggccatagatgaaggacgattgaagttcaccgatggctccaagatgaagcttgatcatgatccttttccggtgaatacaattaatttcaatgataagaaggtgttgattcggccggagcaagccgaatctactaagggaaaggaagtggtcattggtgaaccaagatcaaagatgatggtgccaaagaagccggaggttggtgtttggaaggagaataagagtggagcttcaacttataaggctcctaggaagaccaaagtgacctttgatatgcttttggagaaatatgagaggcaaggtggtgagaaaattcgcaacaaagggaagagaccaagatcacctcctagggaacgatttggtcattcaccaagacggtcgcattcaccttcatatcatcatccacaagacatgtcatggggtccctatccgatgccgccgccgggttattcttatccctacttcatgccatggggggcaacgccgccaatgtaccatcatatgcctccaatgcaattcaaccaagggtggggaggaccaaggaggacaattcatgagcgtttgtcttcgccaaacaatagccggttctatggtaagaatcgggctaatgaagaaaagagggaaggaaagcgcgttaaggtggaagagaggacttcggaagtaattactatcaaagtgggtcccatgatgtgcctatacattctgtagatggagttggaaagtccccaagcaaaaaatccgaagccggtaccagctcctcgcagacggtcggtctgaccaggccctctggccggtctgaccgcggccatgttgccggtctgaccgggccatcaggccggtctgaccgtcgacccgatagtggtccgaccgacgcctcaggctggtctgaccgtgtgccacacgtcggtctgaccggcgcgactggccggtctaaccggtggtctacggccggtctgaccgggctccagcgccggtttgatgagaggattgtaaagagcgatgtgagggcttcatcattttcaagcaaagtcaatagaggacattatttacctcctggaacagagccgaatcctaggtggatgcctaaggatttgacggctactcaaaagagaaggttgcaacgtcttcggacccaagaactaagggagaaaaaggccgaagatcaaagggataaaaggttcaatgagttgcgaccaccaccgatatggaggcctaaatccatagagaaggcaaaaccgattgatgtacaggagaaggaagaacaatcggttgataaaagtgatttatctccaaaagaagacatgtatataaatatggtatatatgttgcctatggagttttgtgctatggatgaagccgaggttgctcaattctcattaggtcctaaagatacggtttttgagaagctcgatgaatcaaaccatcatatgaagcctctctacctcaaaggccatgtggatgggaagccggtctctaggatgctagtggatggaggtgctgctgtgaacttgatgccgtactcgttattcaagaagttggggtgcgaggatgatgagttgaagaagactaacatgattctcaatggcttcaacggtgaaccaacggaggcgaggggtatcttttcggcggagctcaccgtgggaaacaagacgctaccaaccgctttcttcattgtcaatgtgcaaggtaactacaatgttattttgggccgttgttggattcatgccaattgttgtgtgccttctaccttgcatcaatgtttaattcaatgggacggcgatgatgttgaaattgttcaagcggatacatcggccgaggttgcaatggccgatgctacttttgagtggcgtcatgggaatatccaatgcttatcggggagggatctttctagctatgattttattagtatctctgatggcaaatttgtacctatctctgtaaagccggctagtgtagcacggctaagccatataaatttgtataacgagtaaagaggctaatttagagtggttacaaaaaagggtgcaagaatatcggtctacaaagaacgatattggagaaaccgttgaagattttgatgaagtggagaagcttggacaagggtttacatcggccgatccattggaagaagtagacataggtgatggaactaaaccaaggccgacttttgtaaacaaaaacataagagccgattataaggttaagataatcaagctacttaaagagtatgttgattgctttgcatgggagtaccatgagatgccgggtcttagccgtaagctcgttgagaatcggcttccaattaaaccggtttttagccttataaacaaccacctcgtcgttttaatcttttactatatgaccgagtcaaagaggagattgatcagttgttgaaggtggggtttattaggccatgtcgttatgcggaatgggtttctagcatagtcccagtggagaagaaggggagtggtaagattcgagtttgcatagattttagagatttaaataaagccactcccaaatatgagtatcctatgcctatagccgacatgatgattaatgatgcctcgggtcataaagtgattagctttttagatggtaatgccggctacaatcaaatctttatggcggaggaggatatgtacaagacggcttttaggtgcccgggatttgttggtttgtttgagtgggttgtcatgacttttgggttgaagaatgccagtgcaacatatcaaagggcaatgaatttgatctttcatgatttgttaggtattatcttagagatctatattgatgatattgttgtcaaatcggatggtatggaatgacacatagcagatttgaggttagcttttgagaggatgcgccggtatagtttaaagatgaacccacttaaatgtgcttttggtgtgtcggcggggaagttcttaggattcatggtgcatgagagaggagttgagattgatcctaagaagatagaaaaaattcatgatttcaaagtgctgacatgcaagaaggaggttcaaaagttgctgggtaaggtgaattatttgaggaggtttatttctaacatagtgggtaaaatcgatgcttttgttcctatacttcgcttaaaaaaggaagccgattttacctggggggcaaaacaacaagaggcgtttgaagagttgaagagatatttgtctactccacccattgtgcgagcgcctaaagccggaaagccttttcggttatatattgcctccgaagacaaagtcattggtgccgttttgacgcaagaggaagatggcaaggaatatatcattacatatttgagtcgccgtcttttggatgccgaaacgaggtatgtctttatagaaaggctttgtttatgcttatactatgcttgtaccaaattgaggcattatttgttatctagtacatgcatagttacttgtcaagccgatgttattaaacacatgttggaaaggccaattctaagtgggagaattggcaagtgggcatatgctttgatagaatatgatttggcttataaaccattgaaatctataaaaggccaaattgtatgtgattttatagtagaccatcatatagatgttgcttatgagggagaggtttgcttagttgaagttataccttgggagatttattttgatggttcttcttgcaaagaaggtcaaggcataggggtagttttgttttcacctaatggcatgtgttatgaggcatcggttcgtttagaatattattgcacaaataatcaagccgaatacaatgctttattgttcggcttacaagttatggagatggttggagctaaatatgtggaggcctttggtgattcggaattggtggtgcaacaagtcgccggagtctacaaatgcttggacggatcactaaataggtacctcgattcatgtttagatattattgccaattttgataattttgctattagacatattgctaggcgtgataattctagagcaaatgacttggcacaacaagcatctggttataatgtgaaaaagggattatttctgatattagaagagccggtgcttgattttaaatctttgtgcgaaattggcaaaactggagactaggggcggtctgaccggcgttgcacggccggtctgatcggtgaccaggggcagtctgaccggccgtatgctgccggtctgaccggcgaccccgagcggtctgaccggccctgcgtggccggtctgaccggttttgggcagagcgctggggggcacgcttcaatcgatttggaggccgaattaattgagaattcggatatttgtgtccaggatacagaagaggattggagaattcctttgattcaatatctaaaagatctcacgcttaaggttgatcgaaaaattcggcggcaagcattcaaatatacattgcttgatggagatttgtatcgccgaaacatagatggtatcttgttgaagtgcttagatgaagatcaatctaaagtggctatgggagaggtacatgaaggaatttgtggaactcatcaatcggcccacaagatgaattggttgcttagaagagcgaggttttattagccgaggatgattgatgattgcttcaaatattatagaggatgtgaggcttgtcaacggttcggcaatgttcaattggcgcccgccgctgtgttgaaccctataatcaaaccatggccgttccgaggatgggctttggatttcattggtcaaatttatccttcgtcatcaaaggggcataggttcgtgctagttgctacggattacttcaccaagtgggccgaagccgtgcctttgaagaatatgactcatacagaggtaattgactttattttgaagcacattattcatagattcggtattccgcaaacattaactacggaccaaggtgcttcttttatgtctaaggaagtgaagagttttaccgaatcttatggcattaaattgttgagttcttctccttactacgctcaggctaatggacaagctgagtcgagtaataagacattgttaaagctagtgaaaaagaagattgaggaacacccgaagaggtcgcatgaggtgctttctgaagcattgtgggcgcataggatatataaacatggtgccactaaagtcactccttttgagttggtttatgatcaagaagccgttttaccggtagaggtaaatcttggttctcttcgttatatcaagcaagatgatttgtcaagtgaagattacaagatgttgatgggggacaaccttgatgaagtcatcgacaagcgcttgaaggcattggaagagatagagaaagagaagaagagggtggccaaggcgtacaacaagagggtgaaagcgaaattgtttcaagttggagacttggtttggaagacaattttgcctttgggtactcgatccaaggagttcggtaagtggtctcctagttgggagggtccttattgagtgtgcagcattgttcgagggaacgcatactttttggagacactacaaggggagcgttttcagtaagcaatcaacgggaaatacttgaagaaatacttcccgagcatttggcaagacgcttaggaggtactatggccggtaattgggttatcgtcctaaaaccaaaaacatgttctatgcttttagattcacgttgttcatcaaaaaggcagggggcatgtgtttacacccaaatttggcacctaggattaaaataggaaatattgccaaaatttggaagtctaccggtttcctccgaagtgggccggtctgaccgccgtgtgttgggcggtcagaccgctggttgagggccggtcagaccggcgatgtgtggccggtctgaccggcaggtccgagtccgactctgtttcgtcgggtctcgaagtttccttgctcaggaagacatgtttcgggtttcctttggtttctaccccgagttgaacgtggaggagggcctgtagagggtaagaccaacccctatataagggacatggccggttcattgtaagaaaccaatctacaatcaatcaatcgaatcgtttttcatattgcttttagttttctcttagtttgtccatctttgtcggtttgcgccgtaaaccgtccgctgccgctgcgagagtgcgacatctctttgcaggtttgtcctgaaaaccttccgttttgcccacgagacgagtagctatctagaaatcggctccgctaggcggtttagttatcaaaactcatctaggtttagctctttgctagatcaaggtggttggtgactctaggatcaccacaaagcttaaagtgctgcgatcgtgcttatcaacttgttaaaaaagttgccaacacacttcttaccaccggacacaagacaccgcaaaaagaggcagcgcaaccagccaccgcacctctccccccctccgcgcgccgaccatgtcgtcgtcgcaagctcgccgcccgcgtttcccgaggggaccggcggccgccctcctgcgttaccagttcaagacagtgaggccaccgacgaaggacatcgtggagctcctgcccgagggagggtctcgcaccgtcccaaggagcgtgctgcacggaagcgcgcttgcggacgagaacaagttcaagtccctgagcaagatggagccggcgatcgtggcggccgcacaggaggatggcgatctggcggcggcggcggcggccgaggcggcgccggcgccggcggacgaggagtaggagaagcctgacggcgatgtggatctagctatcgtcaagttttttcatgtttcttagtatcttagttccatcggatcgagtaactgtactatgtttccatgttctggtatatctgtatgatgcatggaccagttatcgaaagatctttggcgctactgccttgttccaagcaaattaattctctatgcgtcatgaattgtgttcttggtgccgtctttgcataattaatttgtattcgttcgtggtcgccgcctttgcttgctcatccaatgtcatcgtcatcgacgtgtcctcgccgttgccggtgcgcgtgctcgccgtggaattggagccgtgtacatatcccaactgaattagcaggactagttaacccgtgcccttttcttgtcgatgtttccacaagtatttttttggataagttatataatttttttataaagtactacgaacagaacactttcttttgcaattaaaaaaatgcaaaaatatatgcagaattcaccactagtggtacattatctttttaactccaattacattcttatcttttaaattccatacgttgctttgcgccttgcatgttgcatgcgaaggagtacgtaccactggacggggcaggtcgatggcaggagagcggtgcaccaaatagaccaggaccatgatagttgcaagtgaaacgggcatggtggcccacatgtcgatcgtttaaccgcgtagaccgtgtccacgttgggatccaccagcagcagcaccggggggaccactagactcccagagcttcgtgtgatgtgaggcaacacaacgcggacaaaagcccaggtagactcattccaccagtgcatgatatcataggcaaaggagacctcacatatcagtagcacggtccacgaagagcagggcgtagggaggggagccgcggagcggcctctgacacgaccgggaatcccgggagaaaagcaatgcggtagggtgctaagggcggttagatggagatcgaacggccacggcgtggtagacaaccaaagccggctggtatcgcgggcgccagtgcgaaatgggtagtatttgaaattttcttttctttttcacaagtaacttttttcttcgtcctcctttcttattttttttgtaaatttgctcagacacaaaattccgatcctacgaaacaatattaagtcataggccaactgaatctaaacaaaacagaaggaacttaccttgatatatacgaaacgagagttgttcgagtttgctatcgacattatcgctttctataatataccgacgactttaacaattgtcctataatacaccattgggctataccttcttttcaaaaattcccaaaatactcttatgtacatacaaggttaacaattaatttatctaatttgaagtttcaaaaaaatatgaaaacttttgtgtggactccttacacaacatagaattttgtatagaagttttcaagttgtttatatttctattttttataaacaaaaatataacttatttgttaaatgctatatttttttgaaacttctgatgaaataaatcaattgttaatcttgtactccctcatctccaagatttgatttttttagggacgaagagagtatgtttctaagcatattttaggtatttttgagaagaaggtccagcccaatggcgtattgcacaataattgataaagtcgccggtatattatagaaagagacaatatcgatggcaaatcattgaactcgaacaaactcagtggtatagaatagattctctcatacgaaaagcagacaggtcacaaatattcataaccaacgacaccttaaaagaatactaatataacataagctaaaaccattgaaaaaagagtgcacagcaacaacatggtcaaaggcgatagtagagcaacggtgacggggaggtttgattctcgagacttgttatatctatccagaatttcttttctcttcttcaactcgaagtgtgatcttgtcaatgcttctttgagtggcatgtcgtacagacgactatgaactacaacatcacatatttttgtctgcggtgatatgtagaagagtccgcatttcaagcgacggtccttgtaccgtctgagcttgttgttgataacatctatcagatgatttataacatgtagctgcttcccgaaagctatccacctgaccaatcctaatttttgaagcttgcaatagtaatccaccattattatcttttgcacttgtagtattgcttcgcgtcccaatgacgttgtcttaaccatggtgcgatgctcactacaagcccatgtaccttgctcgtccctagcgcatagtctatacttcttttttctaatcttaaaccccttctttctttgtcctttcctgaagaaaaaaaaaacctggcgagtaagaggagaattaaacttcctaaaacataaacatgaaaaagctaaactggcgagtctaaacatgaaaagctaaattatggctacataaagaagaaagacgaatctaattgcaaattatgtaggaggaaaacatagatggatttgtaatttagctttgcatatgcacgtgtagcgacgactgacaaatacaattatactcagatgtcattgtgtgtttttattctcaaacatatttgcaaataatatttgcatatttgcgtggtcgtttggggattgaaagtctattgatacatacttgatgtgactgccgcaagttagattcttgtccattggctttgctttgagatgcaaacctgtgaatcccctgtcgatcgcggatgtcttttgttttttgatggctcgatcgtgaactgaacagtatatactagtagtatatatatcgtagtagatcatgacatcatgtatgtgtcctggttggtatccagaagctctttttgtcgtctgacattaaggtactacaaccgttcagttgtggggaacaaggggattcacagattaaactcgcttagttaaagataatctatctccaatctaccatatctttactattataaaaattaaaaatatttttattaaattttgtcacgtaatccgtgtttgagttggttttcgaagatggttcggccccttttgacgtttcgtccgtttctcgtcacgctggttccgtccgattaaattcatatcgatcaatctttttttttctttccaacgtcagcgttcgagtctgcatcggttgcgagcgaacgagaaaccgtgtagcttccggtatttttgaagcgagcgccgtcgttgtcagttcaactcctaaaaccatctcccctccgccaccgtcgcatcggcgccttgtctagtcgccgtcttcgtgctgcccgggagcagtaacaacagactgttggcccaaggaaattgggctaagctttcgctcggaaccccctaccgccgtggttcgtcgcctaatccgaaaccaccatctaaacatcagcggcacatggcttccgccacacccgaccgacgtccctccgccggccatcttccagtcctgccaacgacaagactgccaccacaccacaccgacgtcctgccatcggccgacttcattgaaccaccatccttgagagctggctcaggacccctccgttccaccacccgctgccctcctcaccagatctgaccgaaggagaacctgggactgggtggcattgcttcggcaacctgagcttctcccgctgacaagctaccacctcaatccagcctacaaacttcccgcaaagaaaaggaggagcaccaggaaggtcgagggtgccgaccaacaacgaaaaagatgacccaccaccgctagctcctgttgcactaccatctgggcctgcaccgacaccggaaacgctaccgctccggctctagcgccggcgccccctttgtccggcttccttgatccacctagccgcgccgcgccgcccacctagccgcagaaggcaccgtgacagcttcccagctgcccggccgctgaggcctggccacgccatctcgcgcctgcaccaggcctcgccgttgctagtcggaggaggcgtagggcggctgctcgtgctgggggcggaaaccgtaggtgggctacggaaggcttgtcggcggagtagtgtggggcatcgtaggaggtggagggagcggagcaagggtagccggactcgtcggagggtcggagcgggcggccatggggcggcaacgccgccgggcaggccacacccctgagccgccgcgcacctcgttcacatccacctccgcgtccagggcggccgcacaccttgctgccacgcaccaccgagccgccaccgccacccctagatggttgataatgtcacaacgtgtctttacaaatcactagctccatttttacctcctgtccactgtccacttcattctttcagtggagaaagatagcttcagatctccgtgattgctgtattttggaaccgagggagtgatgaccagagtttacattaccgtttccaacatgagaaccgttttcgataaaatgggccacgaagtatactcttgatctgggtctaaatttctatagtatcaccctcttaaagaccagtttaccattgttgacgagcccaacaaggcatatattaaccatcgaaagtagcccaattaagaaattgcggaaaaaataggcccagtccaattagcccattctatataatccccagccgcccacttcttccgcccttcacgcatctagggtttcgccgccgcctcttcgtccccgccgcgacgatggtacgctcctcgatctcgcgcccttctctcgtggaatccatgccggccggccgacgtttcgctgatgtgatcgcttgcttgtttcgtttcgccgcagccgtcccacaagaccttccgcatcaagaagaagctggcgaagaagatgcgccagaaccgccccatcccctactggatccgcatgcggaccgacaacaccatcaggtgatttgatttgcttgctcccctccttcttgctaagtcttttgctcctcccgcgttcgattcggcttaggcatatctgctgagatgtcgtggtttggtttgtgttgttcaggtataacgcgaagcgcaggcactggcgccgcaccaagcttgggttctgagcaggaggtggcaccggctgctgcctgcggattttgttttatggatgtttcagtgtttatgcaagcttaggatgtgattccatgatgctttttattaaggttttctgaaatgttaagggtagtagtactctggtttactgaggataccatgctatgctgtgctgagtaaaagaaccattctaatatatctgccttgttgaagttatttctcaggcttattctgtttcatttttaaatttgttattgcatagctggagaggtgaattgttctcaatatcgttgggagtatgattgctctattgttattctattgggctgttgttagagtagagtaggcacatcctaccaaaagctttccgtcacaaaatatagcaacctaggattggattagatgcggggtttgtctatatttgttggactaggacgtgtctaatccagttataggttggtatattttaggatggagtgggatccttatgcaggtcaagctgttggtataattcttctgtgtgtatggagtttatgtggattacgtggttttgcaatggtccttataggaaaacaaactaatgctgtgcatctaccattggtacaattctatgcaattgaagctaatgcaacttattttctgactgtaataatgttgcaaattgtgattgtctacgaattggcaaccatctttctcagatagttactagatctctttattgaacaatggcctcattgggactgcttgaaatatattattcccctgattatctacttgatcatagggataaattaaatatttttagaaacaaaatgaacaaatagtttagaacatgagggctacacaatgcagtagaaagtgtttgagaaagcatatttttagaagtgtggagcaaacactccacggccatatctgctggagtgtacatttttggtcgtacaacagtagtggaaccctttttttttttttgctgtgttctacttctatccatgttaaactgaaagtagtcaattcatgtgcttgttaataccaacatgagttctgtatcaatcatagaagactttggttatgtttgggctttatatttccatgctgtaatgcttgtgttctgctgtgaactatggtcatttgaccgagatatgcactaagggatcgtttatgcttgtttcattggtgtgctattctacatgagaatacatggatataatacatggcgaatcctcgccaactcgcgagcttcgtttgaacggcgagcttagggattctgatcccgcaattaaaaaaaataaaaataaaaaacaaagagagggagaaaagcttcggcctgaaaaggccgtggcctggtaacctgagttgggccctctcagcccatgggttgctgacgggaccggcccatataaggccacctatttcagccatcggcccatcatcatccatccaaagggcccaacaatggcaaaaaaaaaaaacacgtcggcagtgtagttttgtgaaattttaggaccataatatctaccacgtgccaaaatacatgtggttttgtatagcttgaacctaggatttattgaaattcaccttcctttttttaagggaaaactttgagcacccgcctcccccaggccgggcccacttatatctgatatctttcataggtcatagactgccctcacaggccaacacatgtcttttctgcacactttgtcctcactcgtgtgcacccgggaagaatttcccggtcggtcacccatcccaaattgctccaggccaagcacgcttaaccctggagttctttggagattggattccggaaaaaatgttgcaacttgttgatatgagtattctattaatcctattaagccctaggccgggatgttacaccctcaccccctcaagagagatcgacgcccccgtcgatcaaccctaggccagaaacgtcctctcttggccacgttcatgtgtccagtgccagcgcatgtgccatgctgtgtaaccactcccggtctacaccagccatgcgcaccatgcctgcgcaactgcgacacacacgctcgtgaaaccgcgagagtcggctctgataccattttgtaacgtcccgcctcccccaggccaggccctaggccgggatgttacaccctcaccccctcaagagagatcgacgcccccgtcgatcaaccctaggccaggaacgtcctctcttggccacgttcatgtgtccagtgccagcgcatgtgccatgctgtgtaaccactcccggtctacaccagccatgcgcaccatgcctgcgcaactgcgacacacacgctcgtgaaaccgcgagagtcggctctgataccattttgtaacgtcccgcctcccccaggccaggccctaggccgggatgttacaccctcaccccctcaagagagatcgacgcccccgtcgatcaaccctaggccaggaacgtcctctcttggccacgttcatgtgtccagtgccagcgcatgtgccatgctgtgtaaccactcccggtctacaccagccatgcgcaccatgcctgcgcaactgcgacacacacgcacatgtcttttctgcacactttgtcctcactcgtgtgcacccgggaagaatttcccggtcagtcacccatcccaaattgctccagaccaagcacgcttaaccctggagttctttggagattggattccggaaaagaagttgcaacttgttgatatgagtattctattaatcctattaagccctaggccgggatgttacattggatggatcatggacagagacaatgtagctagggggtgtttagatggggctaaaactttttagcccatgtcacatcggatgtttggacgctaatttgtagtattaaacatagactaataaaaaactaatttcataaatgagagctaatccgcgagacaaattttttaagcctaattaatccataattattaaaagtttactgtagcatcacattgtcaaaatcatagcgtaattagactcaaaaaattcgtctcgcgaattagtccaaggttatgaaataggttttgtaattagtgtatgtttaatacttcaaattagtatacagacattcgatgtgacagagacttagaataagtccctggaaaccaaacaagaccaagtggcaactgtcaatgagcagcactgtagccatctcctaagagcatgtacaatagcagactataagcctaatataaacatattttaagaagataaaagagaatagcaatgagctacatatttgttgtcagctacaacacggactccaaaacacagtgtgtgtgacaggtaggactatgcgtcaatagtgtagtatatgtttataggtaactattgtatgaattggctattaaattgattatagatgatttggagttagtagttggctatattactaaacttggtctaataggaggaacactcaaattatggggataatgacagcacaggacaggacacacaagggatgcttctgtctctcaaacacatcatgcatgcagtgatgcagatgactcctccattgtctttctcaatcatgtgccccttgacaatctgaggccaatgagatcagaagaactcaaaagccacactcctaactactgctccctgtgtgcatctccatggatttggctggccccaacaactcgaggaacaacaggttttgtgtccttctggcgacttacctttcctttctgcacaaagactgggacagcaaactggctaaaagcaaagaatctgtgtcatggatgtcactggtgactcgtttacatgctcatcaaatcggaatcaaaacaaatgcagctatggaaaaccatcctaggtacctttagtaacagtaacataagcagtgacaaatgctgctaggggattagtaccacttactatcagtaacaaatcactagcttcatgtttacctgcagtccacttcattcttgcaatggagaaagatagcttcatatctctgtgatcactgtattttgggacagagggagtaatacattggctacgttagttcagacgacgtgaaagttcagagatttaggatgtgcatggacaagattgaatgtccggtgataaaatgggaaatgattcagcagaggaaggaatcaaaagatcgagtggtgtcacacgattcagaaaacgcagataggagcagcagctttcgcaccgagttcgagccgctggctgaatcatgcccagcgcgacacgcagacatgaatgcaagctgcagcaggcaggcaacagcaaacatcactggtcaagactcaaaagaacacactctttgattagcctccaatagaatcaaaagtacctaatacatggtgcattggtgaccagggtttacgtcaccgtttccaatatgagaaccgttttcgataaaaaaaaactgctgatttttggtcaactccgtacgaaaactagctgaaatcgatcggttttcacaaactggatcctagcggtttcacaaaaattgatcaaaactgtgaaccatggtggtggcattgcagagacgctgtcctaaataggatttaatctttcggtttagtcatttatataggggtggacaattttagaaatttcggtccgaaattatatgaatttttaaataaaatttaattaaatttgaacaaaatattaccaaaatcacgaaaatgaaaaaaaaatcagccgaaataatattatatcgagggtctgaaatttcgaaccctggtcctaaacctctgaacctaaacacaaccacacggtccaatcaaccaatcccggcctgaacctgaaactggggtgattgacagaaacacacaatgccctgcaagtttcagggagaggctgaccggaattggcaagtcatgtggaggcacatgccggccatgatgaggtgcatcctccctagatactactctcgtatcgtcgtcgtcgtcgtcttcatgttacatgttcatgtcacaacactcgcaatcacaagcgcacaaagaaaggacgcccgcattactctgatgatatgatcggttcttgcagcagctactccctccgtcccaaaagaaagacaaaccctgtatttttgtgtccaactttaactgtccgtcttatataaaatttttttataattcgtattttcattgttgttagatgataaaatattattaatattttatacatgacttgtctttttaattttttttcataattttttcaaataagacgaacggtcaaacgttggacacggaaattatgtttgtcttttttttttgcgacggagggattatagcatacgccatgatcgatcaccacgttaattatctgccgttttcggacgcttgcgagaacaaggcgccgcccctggcctacttggaagagtcaagcttagaggagaagaagaaaaaaaatttcaggtcgtggcattcgtcatgcttgaggagggacacagaactctatccaatcatcatcatactaatcaacctcttgtctgaatatgattgcttcagggattaagatagcaaactctggagagcgtcattaattggttcgttttttcagttatgaatcattcagaatcttcagcttggtggtgcactggtgcataaactactgtaatgcggattggaagatcggaaatgcaacaactatctcaaaagaattctcatacgctgatcaagagcaaatccgagatcaggattctgaataaaggctgatttttttttactctatgctggatgctaaatagcctgactaatgatactacttggtagtaatatacacgtactagtggtggtgaagaactgaaagaacacgtatgcattcggatgcagtgctcgctggtgcaagaacagagtgtgtgtgtgtgtgtcacacagtgctagtagcagatctccatggagaagttggagtcgagcagctcgtcgatcatctgctcgacgtgctgctcctcgaggaacctgccgctccattccgcgccgtacgtcgtggtggtccgcgcgtcgtcgtcggcggcggcggcattgccgagcggcggcgtcgtggcggaggccgaagaggccgcggcggcggtggcggcggcctccctctgccgctgcgtggcctgcacggacgccaggttgaaccggtggagcttggcgacgagcgcggcggagaggaacgacgaggacgcggcggccgccgccgccgccgcggtggcgtcggcgagcgggaagttggtgcgcgcgcggggcccgcacatgatcctcgccgcctcgtcgtacgcccgcgccgcatcctccgccgtctcgaacgtgcccagccatatccgcgtcttcctgcaaaatcaccccacggtgcaccaccatgagcgaacccctaaccaaccaagaaacgcacggcgacgacggcgaagaagaagaagaagacgacggtgtcgcgcgcgcacgtacaggagagggtggcggatctcggagacccaggagccccagtggcgctgccgcacgccgcggtatcgttgctgcggcctcgccatcagcttgtaggcttgtctatggcggcggcggcttcgcgggtgatcgtcgccggcggcaatgggggcagtgatcgagcacttcgccgacgtgggtgcgcgttgccaggttgcaggggagggagtgtggtgcgggagccatggaaatgggctataaataaggagggaaacgtcggaatctttttcattgctcggatggctgctcgggtggggcccacataaaatgcctcagtagcattgggtgtatggccactgggcccactagactgttttaagctcgtcttttcgcttatacttatacttataagttaaaaattgaattttaagttgattttggaatatgttcatcgaagtttattttttagcatttgcgatcgttaagaacacgtatataaaagtagtatttacaaattatttttcgtttgtaaatatgttgtttggcttttttaaaaaaaataagtgcaacgatgggccgtttgtttagtttagtttgctttggtttgattgtttggttgatccttcttgctttggtttggttgatctttagttgtgactgtgatctgtatattcttttgatttagttttacttgttagatagggaatagtaataaaattgactagtaagaccatcatgggcgtactactactttatctatttcctaggaatgttacagaagtttctttgaatagtttaattctgatcggatatgggaatgaatggatagagaaatcaattttaacctatttggaaatttgattaaaattgtagtatttaaagtaaatttttaccaacccatagtagaacaacgtacacgtattccaagttgtattttgaagaccggttcaaccttcaaaacacagattcaacaggttgtctgaactgatcgagttggattgtcagagatcaaactggactgaactttcgttcacttcacctatcacaggattaaagatttacttatcacagaagaggagatatgcagagatccagagacagatgcaaagaaaaatctcccatttgatctcactgactcttctccctgattatcagacaacccatcatgctgaagattatcatgccatttcgccatttttcctgtggccttgcccaagaacatgcaagccagacaaaataaacctcacatggacggaaaagagccatctgtctccaagcttgcgactgatcacacaccatgcatctatcatccatccaattttggtgtgtgctatccagaaaattaaacatatgtgataagcatgatatgatctagacctagctacccaacgtctcagacacaccacatgtgaccctttccctttcacctcatctatagctatagctcccctgtattaaatacaaagatgataaggaagagaccaattaaatggcaaatgggtcgtttgattctctgccattagtccaaacagcattcatgcatgcatgacatgaacatgccatttcgatgtgtatttaattaagtttgtaacttcgatttctgggacattccagatcaaactgaaactgtttgaaaacgagtacagaaaaagtatcggagaggagtcgaattcttggtctttatgattgattagttctgaacagaggatagagatttgtgagcttttaatcttgacgtacgccacatgacgatgcaattgtttcacaaaggtggatcaagttaatccagtcaattcagtcgccgaattttttaggaagactcgaagtcaccgacgaaatatatgctcgaagaatgaatattacgcatgttgactcgcaaatcgtcgctaactgtcccccactctgcttgtgatttttaatcatgatcaatatatcgatcgacctcaaagcaaaagagagtatccaaggaactgtcactgtgcactagctgctaatactacatgtatatgacgcttttaatttttagatataatatttgactatatgtttaaatttgacgtaaatataaaaagatataatttttttgacgcaaaaaaggatataaatcatatttaaagtacatttaaaaatattttttcgtaaacccgtaaaaagattgcacgtcaaaagtactttttaataataaaataagtattattctaacaagatgaatggttgaatgatatgtctaaaataaatattccgttataggacgttttaactttggttaaaatcaaactactttaaataaaaggtagtaatatttacagcatcagcatagtttcattaaatctataattgaataaatgttcataatatatttgtcttgggttaaaaatattattatttttttctataaaaattagtcaaacttaaaataatttgactttgaccaaagttaaaacgtcagtatcatatattttaaaacggagatactctatcattgtctataaatcaaaacggcccgaatcgacgacggagatcctagaaagaatcgagaataatcctccgcctaactcaatgaccgggtgagcacagaacagaaggaatttagacctaaccacgatataaatactgcaaccctctcgtaggtcagtgatgcatggtaggtaggtaaagccttgcaagctgcattgcagataaaaggaagaacatggcatccactgatgataagactactactacatggatgtgtatagggtctacgtacccaatccgtgtatagcctactataatagtactaggctactagcagtgcgtcatatcttacactaatccaatgaaatgaatacctccataagttactcccaacaaccatatgtagcatcaaaattcagtctgacattgcatatattggctccaaactcaaagtctgaagatatatggatggagtccgaaagacaaaaccaggaatcgagagttgcatatatatgcacatggatgatcaggacttgatgcatcgaggagtatgcaagcaagcatggatcggatggatggtccctggctatagctaagtaggctatagctatagctaggagagatgagctgagcatggatcagtggccggccgacgagtcgcgagttgcaatcgtctctggaatatggatggatcatgcatgttcacctccactgcgtcactgatcgatgctaattgctagctggtggacgaggggtgcagagagcggacgaaggatcctctaccgttgaagtcacgtgactttatcactgtcacgtggacccccgatgattcgtgggtttacatatcagtgacaaaagcaccgcgcaaatcaccagcgcgcgccaactttcgttgcatcgggaagaagaacgtagtgtagtaacaatgcgatggtatcgcgacgcatgtgctgcggccgtgtgcgtgcgtgcgtctctccgttgaatcgtcagctcgcgcagcgcacgcacgacgcgctgcggcgccggcggcagccttatagcctggaggctggaccgcgctcgctgtgtgatggcgtaggctgcagtagctgcagtgtttgcagctagctagcgcaacggtctcagcgagagctggagcccgcattgctgctggcctggctgcctctctctcgatggctctcgcaccacgtggagttcagtgcgcgacgcagataggataggcagggtttcagtgttccacagacagggacaatgcaagctctctcatgagcatagtagtacgtagtatcaggggcgcggattcaggaaggactaacagaagagaggccgaagaaactatacaaaactatagccctcttttttaatgggtgtatgataaaaaaatttagtgagacttaatggaaactctcatagttttaacgcttgtagtggtgactctacacgccgtcgctcccatggtagatccatcactgctagtatccaactatccatggtggtaatttgcaaatcgcatgcatgctcacgctccgatcgatcccctcgatgaagatgaatctgatcagacatttgctatgatcgctggctggaacactgaagcctgaagttacaactggtttattaacaatgagctaccatatcctgaaaatacaataccttgaaacttggagctatatatacagcctatttttttatataagctctcgtatagctgtaagcctgtaaatgtggacaaagttcagttcttgtattgttgtcctgttagggagcgctgcagatggccactggtttcagcctttcaggggccctccagaaaccacctagccatatttttgcacaaattttatcttgatttctcttatagttaactgcctgacacgtaagaaattgaggatcattccggcaaaagaatctagctctgtagctttagctcactagcttttacagtggatagctgctgttctttgtagatcccttttgtatctcatctgttccatcccctttgcaaaaagaagaagtgatcaactgaaatttagcaactaacaatttgttaacaaccttcttgccgaaaaaaacaggaggaaaatttctttcagactgtcaccaaagtcgagaaaaaccaggatcgatgcagtacttgtttagctgcaatgtcttttatgttttgctgcactagtctgtctgtctgcaggatcggagcacactgaaagcaagcgcagctgttgcacatgctgcatgcacacacactgaagaactgacggctgaaacgatggtccaggtgcataacgaacttggtcttggtgcaggtagagcctgacatagtcatgttactgtcaaaccacaagtcccaaccatcctatgtaatccaaaatggacaatggctcaatgtgagacagctgctacaacatttcacatttcaaggatatcttgaccaaagatacacttttctgacaatttctgtcattttttaattcccagcaaaccgtttaagctaccttaaaatctttgcagaaagattgtaagttgtccacaaggactactgtgatgaacacggcttgtctattcggagataactctataattagttcgcccatcattgtccggtatgggtattacttgttagcttgctgaagtgatcaagcagacctgatcatgtatggatgattgctaattagttttctgctggtcaattgcagtcattagccctcgcgaatgatccgcatttcgtgggatcttacttgacccgactgacacctaatgattgggacgcaatctaggctgctactaaatgaattttaactagttgcgtttgacaaagattaagacgaacagtaaacaccctaaaactctgaaaaatgaaaatccagtcaaaatatctccccttaatttcttctgtcacggcttcagctattcagctgtattttggggagatgcagaaactgaactttcagcgaacagcacgacacgcatcgttcgcatcacatatattcatatgccgtcatgaaacttcaatttgtcccctgcaaatcacggtgaattgcatgagaactgcctgccggtgagagtgcatggcaacacggcatgcagatatgcaatgcaagatgcaactcacctgaggatcatggcagacagaacgcaaaaacacccacatggctgcgattgcgacctgataaaaccggggctaacgatcatatacgagcagaatcagttaagcagattagcattggtccggagacagccactcatgcagcagatgatgctggggataagctagatgatcgccagcgactgcctgtctgcctgtgccggtgatcgcgatgttcttgcagagattgggcagatgtgaattcaattcaggcgaccgatcgatcgacggcagccatccagcactgcatcatctagcatctgagtgagatcgatcgatcgatcgaccagaaaaatccccatgtgacaagaaccaatccagcgattgcgatgtccacagggatgaagacgtcgacgcattatcgtctcctcaaagattcatgcattcatccatccatatgttcgatgaatcgatgtctctcgttcaagattgcatccatccatgcatgctggctctctgtgcagtcattttgcctgcagtgcaggacgcgtttaggagaggaggagatcgacataagctgtctttgagagggacatcttgtgttttcttctcgttgtttagggcgcgaacgcacgatcaagttgtctagctgcgacgtgcctacgaaaaaaaatgtaggttttcaggtgagaagaatgagataatggacggctccggaaattgcggtccgggcatacatatagctgggtttgtagatgatacggagtcggttgttattcaactgccagttgctaagtgactgtaggcccgttgaatggattgaaatagaatcttgattcgttctttgaacacacgcacgtaaaccctacccggcaaatcctgtacctcacaggtacctcactgtcgacgggtacgtcgcctaacactgaaagcacaacaccgttaaatcctagaaaattcgctcccatgtcaacgccgttaaatcttggaaaattcgctcccatggggggtcgaacccaggaccttaggtgctactgagacttttgtaaccactaggctacatgccccttcgctttttcccaattattataactacacgatagcacaaacactgccgcgttttggagcctcataggcatggtttaattattcggtttggccgattctatcataggtcaccaatataccgaaatcttggaaaattttgaacaaatgttggtcaatttttaacaaaatattaccaaattcaaaaaaatgatggccggaataatatcgtattggaggtccgaaatgaccgaaatctccatctggaattttaaaaaccctgcccatcggttgcttattggggaataaaaattaattggtaactaaatttttttacgtcaagtaagtaaaatttttatatatttattcataacgatttaaaagccaacgctaaaacaaaattacgtggaaaatatctaaacatcaactcgaaatcaattttgaaaattttaatttttgcttttgttttggcttattagaccaacccatgagtctcttaattgcagatgttggaaaatgttcgagatttttagtcttgtgtcaagataatttttcaagcttgtttagaacttggaagcgatggatttgacaacagaaaacataaagattctgttctaaaaaaaagacgatataaagattctgcctgaatgtagaattttcctaattttgagtggaaattattgagctgctttgcgtaaattcattacgaatcctactacgacaaggtgacctttcagtaataatcaaatgggccacgaaatataatcttgatctgggcctaaatttctattgtatcaccctcttaaagcccagtttaccaatgttgacgagcccaacaagccataaattaaccatcggaaagtagcccaattaagaaattgcggaaaaaaaggcccatcccagttagcccattctgaaccgcactggtgcccactatataatccccagccacacacttcttccacacttcacgcacctagggtttcgccgccgccgccgccgcttcttcgtccccgccgcgacgatggtacgctcctcgatctcgcgctcttctctcgtcgaatccattccggccgaccgaccgacgtttcgttgatgtgattgcttgcttgtttcgtttcgccgcagccgtcccacaagaccttccgcatcaagaagaagctggcgaagaagatgcgccagaaccgccccatcccctactggatccgcatgcggaccgacaacaccatcaggtgatttattcttcgcgctcagtctttgctcctcccgagttcgattcggcttaggcatatccgctgagatgtcgtggtttggtttgtgttgttcaggtacaacgcgaagcgcaggcactggcgccgcaccaagcttgggttctgagcaggaggtagcaccggttgctgcctgcggaggctagggttactgagttatctgcatcattttgttttatggatgtttcagtgtttatgcaagcttaggatgtgattccaggatgctttttattaaggttttctgaaatgttaagtgtagttgtactctggtttactgaggataccatgctatgctgtgctgagtaaaggaaccattccaatatatgtcttttgaagttatttcacaggcttattctgtttcatttttaaatttgttattgcatagctggaggggtgatttgttctcaatatcgttggaagtatgattgctccattgttattctattgggccgttgttagagtatgattgctccattgttattccatcctaccaaaagcattccgccacaaaatatagcaacctaggattggattagatgcggggtttgtctagatttgttggactaggatgtgtctaatccagttataggttgcaatattttgggatggagtgggatccttaggcaggtcaagctgttgatagtaattcttttgtatgtatggagtttacgtggattacgtggttttgcaatggtccttctaggaaacaaagctaatattgtgcttgtaccaattgtatgtatggggtttatgtggattacgtggttttgcaatggtccttctaggaaacaaagctaatattgtgcctctaccattggtgcaatgctatgcaattgaaactaatgcaacttattttctgactgttataatgttgcaaattgtgattgtctacgaattggcaaccatcactctcagatagttacttgatctctttattgaacagtggcctcatttgggactgtttgaaacagattattcagctgattatctacttgatcatagggatgaatttaatatttttagaaacaaaatgaacaaatagtgtagaacatgagggttacacaatgcagtaagttttttttgagaaagcatatttttagatgtgtggagcaaacactccacggccataatctgcaggagtgtacatttttggtcgtacaacagtagtgttaccttttttttttttgctgtgttctacttctatccatgttaaactgaatgtagtcaattcatgtgcttgttaataccaacatggattctctatcaatcatagaagactttggttatgtttaggctttatatttccatgctgtaatgcttgtgttctgttgtgaactatggttatttgaccgagacacgcactaaaggattgtttatgcttgtttcattggtgttctattctacttgagaatacatggatataatacatggcgatgatgcttttttttggttggatggtctgtctaggttcgtagctcagaagagtgtactagcttaaggatggggtcttgtttgtcacagcagtgcaaggtgtgttttaggtttgggttgactgtatgattcaatgcctaaccttttatgctgaactcgatcatatggtttggctatgtttgtatgagactacatgctagttcattactgtgaattatatgacgtacgaactggtgtaaatgatgtcattattgattcgtctactaagggccaagtttgggacttctgtccatttgtcttacagctcagtttgacatcaatgatctgtccattaggttttatgccaagttacatactaataatcttgcctgagctgtgagcacacttctacatttcggtgccgaatcatttcgttctctctgttgagattgttccgactgatgtttcattccactggcctttgaattagacgccgactgcaaattgatatacacatcttgctgcgtaagacgagtttacgtttgcctttatgagcccaaggtcacgtttgccatagccgcatgggttgtctagccgagcccacgaggaaattttatggccgcgacaaaatctcttgtatgctaagtgtattgccatcaattattgaaagaagtaagtcattgagtgattactcattaatttccctttaaaaggctattacctccgtcctaaaataattgtatttctaagattcaaaattcgtcccaaaataattataattctagagttctaattgtcccatcgatctcattcaaatttctccttattttaccatcaaccatcttctcactctcatataaacactatttaatgagaggtatcatatgctttcttctcaaatatttatatatgctaaataacatagaattacaattattttgggatggacgtagtattttattgtaggatgctaagtgtattgacaccagtcgcttagggtatcgggcgaacgtacgtacccacaagcaaaaaaaatcgcacctacactcgtgtgtgtatccggcggatccatcgacaaaaaatgccatccctatatatcctggtacgtctccttggtgcaaggccgtacgataggaacgagtttggaaaaccgaagacgttggtctgacacgtagacgactccggaacgaatttctccgtgtcgtcccgtcgtccggccgcaacaaaaaaaaaaggtttgaaaaccaaaagacgttgatctgacacggtagacgactcgggacgaacttgtccgtgccgtccggccgcaacgaaaaccaccaaacgtgctgcaatgcatggccattggccagcaatcaagcctatccggtgggtgcggacggacggcaggcgcggcgaacgggaggccagccgcgcgtcgcgcccggggagacacgcatgcaaatccaaagccgctagtggagcgcgcaacgttgccgagtccccgctgcttataagaggcggcgaggcggtgccacggccatctccgtccttccatcccagccgcgcgcgcgcgctcggactgacccccacccccaccgaggcaaagcctcgtactccttccctccaccaccaccgcgcgccgtccgcgcggctgcggctgcggctgagggcgaagccctccccctccccccccaccccaccccacctcatcactcaccaccaaactaataaacccgtcctcccctcccccccatggcctccatctccctcgaggacgtccgcaatgagaccgtcgacctcgtacgtaatatatacagtcgtgcaattcttttgtgcgttcgttcttagttttttttcttgttttgtttgtttgtttgcaggagacgatcccggtggaggaggtgttccagcacctgaaatgcagcaagcaggggctgtcggcagcggagggacagaacaggctcaacatcttcgggccaaacaagctggaggagaagacggagagcaagctgctcaagttcttgggtttcatgtggaatcccctctcctgggtcatggaggccgccgccatcatggccatcgtcctcgccaacggcggcgggaggccgcccgactggcaggacttcgtcggcatcgtcgtcctcctcgtcatcaactccaccatcagtttcatcgaggagaacaatgccgggaacgccgccgcggcgctcatggccggcctcgcgcccaagaccaaggtgctcagggacgggaaatggcaggagcaggacgcgtccatcctcgttcccggcgacatcatcagcatcaagctcggcgacatcatccccgccgacgcgcggctgctcgagggcgacccgctcaaggtcgaccaggcggcgctcaccggcgagtcgatgcccgtcaacaagcacgccgggcagggcgtcttctccgggtccaccgtcaagcagggcgagatcgaggccgtcgtcatcgccaccggcgtgcacaccttcttcggcaaggcggcgcacctggtggacagcaccaacaacatcggccacttccagctcgtgctcacggccatcggcaacttctgcatcatctccatcggcgtcggcatgataatcgagatcatcgttatgtacccgatccagcaccgcgcgtaccgcgacggcatcgacaacctgctcgtcctgctcatcggcggcatccccatcgccatgcccaccgtgctgtccgtcaccatggccatcggctcccaccggctgtcgcagcagggcgccatcaccaagcggatgaccgccatcgaggagatggccggcatggacgtgctctgcagcgacaagaccgggacgctgacgctcaacaagctcaccgtcgacaagacgctgatcgaggtgtacgggcgggggctggacaaggactcggtgctcctgtacgcggcgagggcgtcccgcgtcgagaaccaggacgccattgacacatgcatcgtgggcatgctcgccgaccccaaggaggcccgcgccggcatcaaggaggtccacttcctcccgttcaaccccgtcgagaagcgcacggccatcacctacatcgacggcaatggcgaatggcacaggatcagcaagggcgcgccggagcagatcatcgagctgtgcaagatgagcaaggacgccgagaagaaggtgcacacgctgatcgaccagtacgcggaccgcggcctccggtcgctgggcgtgtcgtaccagaaggtgccggagaagagcaaggagagcgagggcgagccatggcagttcgtcggcctcctgccgctgttcgacccgccgaggcacgacagcgcggagaccatccgccgcgcgctgcacctcggcgtgaacgtgaagatgatcaccggcgaccagctcgccatcgggaaggagacggcgcggcggctcgggatgggcaccaacatgtacccgtcgacgacgctgctgggcgacaagagcagcgagatgagcggcctccccatcgacgagctgatcgagaaggccgacggcttcgccggcgtgttcccggagcacaagtacgagatcgtgaagcgcctccaggaccggaagcacatctgcggcatgaccggcgacggcgtgaacgacgcgccggcgctgaagaaggccgacatcggcatcgccgtcgacgacgccacggacgccgcccggagcgcgtcggacatcgtgctcacggagccggggctcagcgtcatcgtcagcgccgtgctcacctcccgcgccatcttccagcggatgaagaactacaccatctacgccgtctccatcaccatccgcatcgtcctcggcttcatgctcgtcgccctcctctggaagttcgacttcgccccattcatggtgctcatcatcgccatcctcaacgacggcaccatcatgacaatctccaaggaccgtgtcaagccgtccccgaccccggactcgtggaagctcaaggagatcttcgccacgggcatcgtgctcggcacgtacatggcgctcatcaccgccctcttcttctacctcgcgcacgacaccgacttcttcacagtattacaaaacacatagtacattttatacgttctcttagagcagagcctctttgattcctttgtatcctcctattataaaatgactggaaaaaaaaacgcaggagacgttcggggtgaggtcgatcaagacgaacgagaaggagatgatggcggcgctgtacctgcaggtgagcataatcacctgggagagtggtgggctctgcccccttcccgctgtttggagtcgtagtatccgagtcttttttttttcccttggtttttttgtttccctcctcttttgatataagtcggtctggtttagtgcgttgagtaacatatattcttttcttctgatatattgacgtgcaatctttttacgtgttcgagaaacaaaggtgagcataatcagccaggcgctcatcttcgtgacgaggtcgcggagctggtcgttcgtggagaggccaggggcgctgctggtgatcgcgttcctggcggcgcagctggtggcgacgtgcatcgcggtgtacgcggagtgggagttctgcaagatgcaggggatcgggtgggggtggggaggggcgatctgggcgttcagcgtggtgacctacttcccgctggacgtgctcaagttcatcatccggtacgcgctgagcgggcgggcgtggaacaacatcaacaacaagacggcgttcgtgaacaagaacgactacgggaagggggagcgggaggcgcagtgggcgacggcgcagaggacgctgcacgggctcaaccagtcgtccaccagctccgacctcttcaacgacaagaccggctaccgcgagctctccgagatcgccgagcaggccgcaaagcgagccgaggtcgccaggtaaaaacttgctctatcccatgatataataatggcaacatatcctatgcacacaggccctcacgtgtacacacgtgcacaccaactaaaaaatgtcaccaaaaaatctagaaaaaatcatacacatactttcaattgtattacacctaagattaaaatcttaacgtcaaattcattatattttagccgtaacaaaaaaaacaaagaatctgacagttttaaggttgcaattttgttagaattttatcttttttgttattctctatgtagaataaatttgaagatgcgactttgcacgtagatgtaatactattgaaagtacatgtatgaatttttctaaaattttttgtgataatttttagttggtgtacacggtgcgtacacgcgagggcctgtgtgcataggatacgctccctataataatacagtactccctatgactcccttaacttttttatcaacgtttgatcatttgtcttatttaaaatatttatgtaattatcatttattttattgtgacttgatttatcatcaaataatctttaaggcatgacataaatatttttatatttgcacagaaaatttgaataagacgaatggacaaacgttgtttaaaaaattaacagcattatacattgaaatacggaggtagtacatagataagacattatctagattactactagtagaatgtcttgtccggtactacgcttctatattacgggaccgatgtagtacattctctgtactgcaaccaaccaatgttcaactttctagctagcacactgcttgatttctcatctccatggacagactgagggagttgcacacgctcaaggggcacgtagagtcggtggtgaagctcaaggggctcgacatcgacacaatccaacagagctacaccgtgtaacatacagcatgccatcgatgtgttgttgttgttgttcatacctgtgttttactcctccccatctgcaagttatttggagatgggggtttcgacttgtgttttgacatagatgtttcttcccttctttgtattttgttaacagggaatagttcccgatacaacaggtggtgcacttttgagtatagtcaagttatttgtaagattttggctttaagccggtttttttggcaatgttattgttcccattgcagatttgcagtctatcaactttgcctcaactcagtctgtatactactgtttagtcaatcatcatcagttttgacccagcaaaaacatgccctgattactcagctgaattctgctcctttaaattcttgtctgggcactgcagaatattagccatttatatccatgaattaatactgtagtttaatacattagccatttcagaaccctggttacatggtttcactacagttacatctttaatactgtagtttaactacagtttcatcaaggacggagtgcatttcttctactcttgcagattacaatggtcatgtcagtgatcaaccgaaactcaaacatgtccttgtcttctcccagagattacagtttcagtgaactcatagccttatacagtctgaatagaagttgtcctcgatttataaatactccacagttcacctcaagccttccggacaatgacatggcgctctctcttgtactccacttcatccctttggtgcatgatcagaagggctcttcgcacctgaagcagccgaatggtagcataagaaaaatgatactaaatcaattaattaaatagcaaatagtatgacaggttcctcacaatggattcattcatccccatcctatttagttcatcgatcaggcgtcgctcggatatgtggcttccaattcccatccttctctttatttgtgcctcagcttgctgttggaacaaaatgggcaacaaaattcagaaaacaaagttgacaagttggcagttcacttttggatgggaagattaaccttgatctcatttgcaatatctggtgataggttcaaatgctcattgattccagatcttgcggcatcaacagtggagacattgaacagcctaaatgcctcttcaacatgctctggtgtagccacacttgtcctgataattattcaaagtgccaattaggaacattataaaacatgtaagttatgacccactggaaataaaagccaatatgtgaaaaatgtaagatataaatatactgctagttgagctactcgcaaaaagaaatgtcaaatgtatagtaatgctatattctcacaatctcatctttgcaagagattcactcaaacgtataatggcttcaagctgccgcacagtgatgggtatagctgcagccctccctgtttcatgagcttgttgtctcattttctgcacaatgaaaaaaataaataagtagaacagtcttaataacagttagactaagtgaaaaatctttagcacgtgcctgtctaatctccacatatttgttctgaagcatctctgctgccttttctgagagtcgtggtttacaagtaacacggcaatactcaatgtacctacacatgtgaggattatgcatttacaatccaagaacatcatatcaaaactgtgtagtatgtatatcagaacatagaaggccaaccacacctttttagccaattctctccttcactagcatctgtattcttggatgaagcagcagcaccactggcatgcaccttaatgatgtggcttgcaattcgctgcaattggaagtttatttagtctctgaagcacatcaatgagctggacaaagaataatgcgtcataccttgtcttgatcatacattctgacatctttaacaataaagattagatcaaatctagaaaggatggttgtctgcagatcaatgttatcttgtgcagtctgaggagtagcaatagaaaatgtgtcaaactgattgccttgcatataaggctagaactgttaatacattttcaaaatatgaaaatagtacaagtcaataataaaaactttgactgaccttaagatcatcgtagcgccctgcaattggattggcagctgctagtaccgaggtccttgaattgagtactgttgtaatgccagctttggcaatcgagatggtctgctgttccattgcttcgtgaattgcaactctggaatcacagcataaaggtaactcaatatggtttcaactttgaagagtaaggaaaaattacatgtgcaatgcttattttagtttctagaaagaagactatagatcaatgcttaccggtcctcaggcctcattttgtcaaactcatcaatacaaacaactccaccatcagccaaaaccatggcccctccttccaaataaaactctcgctgtacagggaaaataagtcttttagttctaggaaacagaactttgagtaaacacaataatccttgcagggaagacaagcttacagagctaccgtcccgaattactgacgctgtgagaccagctgctgatgaacctttcccagatgtatagacagcaatcggcgctgtcttctccacaaacttgaggaactgttggaatgtacagtttcatgtcactggactagagataattcatttctaatagcgaaaaaacacttgcctgtgattttgctgttgatggatcacccagcagcaagacatgaatgtcccctctcaaacggacaccatccggtagcctctgccatagaagaaagtttagttacagctcattccaactagccactggatccaacacaactttgtattttcacatattagccactgataagatcaaaaatataccttctttgagccaccaaacagcaagcatgcaatagctttcttgacatcagaatggccataaattgaagggccaatcattgagcaaatcttgacatatgcatctggcctctgtgcaaattctttgaattccatttcctacaaaccaacaagaaaattaacattgtaaatatgctgtaacactcttaaaaaagaaacttggaattttggcaaagcaatctacctcatcaagtgtaaaatttgagggaccattcgagttggcatctcgggactgctccaaccccacaactctaatgtaaggctgtttgactccaacagcacccttttggctgcaaaatgaatatttgagcgtcatcagctatgcaagtagtctagctcaacaaaatggaaacaaactgagcagatgttttagatccaacatactttgcagatgcttggtagacactgtagataccaattacagttaatctagttccaggaacaatggtctgaacaagatgcctgtctacggacagcagcatattcctcgggagctcaccagttggaacatcctgttaaccaagtaatatacagcttggtgattgctaaatcctaaggacatataaccaataaacctagaaaaccatagcatcgcagcgaggacatataatgcagtaacaaacctcaggattttcctgcaatttgagggtctggagatccacatacttgctcttatctggaactgcaatccaggggtccaaggggcaaggctcttctccaggctgaaaaatggtaaagaaaactcactcatatacatcagaattaaaacacaaacaagacaataacccaattatgtttagccggagttagacctgaggaacatggtcgcacgatcgtgggacaatagccccaccaaggccaggcctacacggcaccgttttcacacttctgcagttcttgcagagcagcgtgacatgagtggccttagctttcaccctcgacgcggcgattgtgatcccggcaatcttcaccagcttggacatgtaatccgcctggaatttggaatacagttgtgtcaatttgaaattcttcacaaggctactaacaaaatcgtttcagaactgaccccaatagacctcatggacaggcagttctcctttgaggacaagaagatctgcacgtcgccggtggcgggctcctccatctcgccggtctctccagcgaccttggaccgaaggctcgcgaggacctcggacgcagccgtctcaaactacacaaaaccctaaatcttaacacaaaaaattgacatcaacagaacccagagccaacaaaaattcagaaagaaccagcacacaccagcggtaggtaatcagcgggagacttccggatcttgtcggacagctcggcgtcgaaggcgtcgaggtcctcgatggcgacggtgacatggtcgcggttgtgcaccaggctctcgctgcaaccatcaaacaaaaacacactggattggtcagagcgaattcgaccatccgacgaggcaccagatctgggagggagggggggcgcaccggtaggggaagtcgccggttgggccggtgaagccgcggaggaactccttgaacttgcggagggcggagtggcgggtgaggtcggcggaggggtcgccgccggggccgccgcgcgggaactgcgcctggtcgctgtagaagacggcgccctcgtcccaacccgacatggctggatggctggctggctgcggcggcggcggcggcggagagagagggagagagacgcgtgggtgcgcgggcggcggggaaaggggggaagacgccggagaagtggcgggaagagggtaatagaggaggagatttggcgggaaactgggggagatttggcgggaaactggggaggtagggtagggtaggagaccggagaggcagctaggcaggccggtttttgtgggcctgggctctcatagcagggtgctaaaggagtagaatgtgccattttggcccaaaagcatggcgatttgccgatttttagagtaaaaagtatagttggggtctctcatttttttgtcgcggagttataaaaccgtcgttgaaccgtaaaaccacacacagtatatcatataacttataaaaccagcgaaaataagatcccttgacggtattgtccgtagttttgattgatgtgatgcctacgttgctcctttaactaggtttttgtctcacgtgatattgacgtgacgcttatatgataatttgatcccgaaaaaaaaataaaaagatatgacttgaaaaaaaataaaacataatatgcggagccatatatcagtcaaacaaaaaagataaaaaatagtgggacccactaacccacttcctccacctctatctcctctcttcgccgacgagccaaagctatccggagttagtgcggaggcctgccaaggggacggagagcccagtgagtgtgcacggagagagaggaagcaaagaggccggtgagggggcaaaattcaaatccatcgtcgcccaacactacatccaccacacggatatggaggcggcgaggaggctcctccaatgaagagtggcaagtccaaattcgccgttgccaacatcacctcaactgcatggagagggagaaggcagggaggccaacgagctcctccaagtctaaatatgccgtcgacgacaccacctccaccacagtcgtcgctgccaccaagcacaggagagaagcaagatggcaactctgatgttgagggcaatctcgaagctgtctcaccgcttgctcagacgacgcatgccaccggcttcggtgccaagatcaacgacaacgacggccaccccgctgcatctagagaaggagaggggagaaggggaagaaggccaccggtcgcatctgcgagggaggctgccatcctcaaaaccaaatggttttcgtgaaaacattagatcttggtttgtaaaaaaaaagagtcggttgatattagccaatttttatataacgtgcgtaagggctggtttagatggcaaaattttttattttggggtgtcacatcgaatatacgaacacacattcgaagtactaaaacgttgtctaataacaaaccaaattatagattccgcatggaaactgcgagataaatttattaagtctaactaatccatcattagtgaatgtttactatagcaccatattattaaatcatggtacaattattaggtttaaaaaattatcttgtaatttacacatgtaattgattttttattaaaccacgtgatgggtgtaaagttttttttgttctggtaaaaaaaccaacaagcccccacatcccaccgattctgaattttcccaggaatctgagcggccgcaaggcgtcacgcgaaacccgtccaacccaactccactccatcctctgcagccgcagttgtgacggagactccaaggccatcaccatccacccgctctcctcctcctcctcctccgcttgatccctccatctcctcgatcgatctccacactccactgcgcactgcaccagcaacgcccccccctgatccctctccacggctgcaccggagatggcttccgcccccttcgccgtctcctcctcaccggcggcttccgccgtggccgcgcgctccaaggcacgggacactcgtcttactcatcttctgtgtttggtttccttgatttggatttggattttttttttaattaactcatgccgcggttcgttggtgctcgcaggtgttgcgaggagggaggagcgaggcgaggactggatgccgcctggggatcacgaggaaggtggtcgcctgtttggattatgatttctgcctctagcttgtttagttgatggtttgttttggatggacatgggttctatcgtctatcttatctgtgatttaatagtgatactgattgcttcctccctcgattagaaattatggtttgtttggtttcactatgaatgactacctgtcagttggcactgtgatctcttttacgacaataatagtaattcacgattcaggagtttatctgctttttgggtatgatatctctgctaatttaatgctcctggagctcttctaatcagggatgggtggctcttaattaaggttttgaatccatactgtcatatgttgacacctaaaagctctttgatgtagaaaataaaatcgaaatgatatatagaaatcggttgagacttgagaacacgcagctgctgaagcatgactaattatcaagctgctaataaaatttggcgatggccttcattggaaaggcatggtgttttgatcctgtaacggaattctgatattttatgtttgttaggaactctcaactcttgagaaatataaaattgactgtatcgagatttattccatgtcaagcttcagcatatggttgtgctttggattaacatcctttcattgctattctgttgcagaattttggacgtgtcatgatggcccttgcagtagatgtctctcgttttgaaggagtgccgatggcccctccagacccaattctcggggtttcagaagcatttaaggcagatcaaaatgatctgaagctcaaccttggtgttggtgcctatagaacagaagagttacagccttatgtcctcaatgtggtcaagaaggtaagtctaataatacctatcatttccttaatataactcagttcttgttgtgacacactattcttacacgtggtaggctgaaactcttatgttggagaaaggagaaaacaaggaggtatggtgtattttccttcaaattcaagtagctggattataaggaattatttctggagttttctgtatttctgtttctgaaggttgatgacaaaattatgttttttttggtgcagtatctgccaattgaaggcttagctgcatttaacaaagcaactgcagaactattgtttggagctgataatccagtactcaagcaaggacgtgtatgtgctgtggcctatgcagctcttgctgtacttattttgtaaatactaagattttctggaatgctgctacagcgaagcatgtccttatatttagtaaacattatttaatgataattccttctgtaggttgctactcttcagtctctctcaggaaccgggtcgctgcgccttgctgcagcatttatacaaagatatttccctgaagcaaaagtactgatatcatctcccacttggggtatgtatgtgaattaatgtgcttaatctttgagcattcaacttcatttttcatagcagagtgtctcattggcaaactttgaactccaatctatattcttacaggcaatcacaagaacattttcaatgatgcaaaggtaccttggtcagagtaccgttattacgaccccaagactgttggcttggattttgagggaatgatagctgacatacaggtcgtgttttctaactcatttatattcaatactactatctgtgttttctattttaaacttgatgagcattgtttagcataactttgtcgttcaaattggcatgtatccatcatagaaatttacacctgtcacttgtctgtttactattgttaattgtcaattttctgtttactattgttaatttctatgtgttgagtattggtttgtgatattgatttgtgtgtccaataggctgccccagatggatcttttgttctgctgcatggttgcgctcacaacccaactggaatagacccaactccggaacaatgggagaaaattgcagatgtcattcaagagaagaaacacatgcctttctttgatgttgcatatcaggtgaaatgttctcactttattatttcgtttttctctgcatgaaaacaaatatcttactgactagcaaatatttctctgcagggttttgccagtggaagccttgatgaagatgcatcttctgtcaggctttttgttcaacggggactggaagtgtttgttgcgcagtcttatagcaaaaaccttggtttatatgcagaaagaattggagcaataaatgttgtctgctcaacacctgaagtcgcaaacaggtgatactttaatctgaatgattgccttcgtagtcaaattgttcgtttctatccagttattgcagcgaatgttaataatagattattctgtttagtgggtaatatggaccaacctcttattgatgtgcaaagcaacttgatttttcatggtaggttaacaagacttctaagcaaatttcatccaggcaaaaaatgttgtaaattcttggaaattagtgttatgtacagattaatagacactagtttttactccagaaaagaaaccaccagcaacaataattggtctcaacccaaacaagcaaagcactgaatttgatgttaaccataaacaaaactccacagacaagatgtatacttcaaattttctcttaaatcaacatgtggcataagaaccacagttcttgatccacttcagtggtatacaacatatccagtgtggaaaatctcatgaatactggtacatggcatttactttgctttttatataagcctgcacacacacgagagtcctaggaccacacaaggacaacttaagatttgtaacgtgagctcagatttgactagcgctagttcatctagcccgtgtgattttacaaactcggtaagaaaattaaactatataactccagtttggacaaagacaccaaaccaactcatcatagttgattttcctggttggtaacttccctccttgatcctctcttgcttatcgtgcataccatacaggcatacacagcttccatgcaaagtacatgccatgtgcaaaaatgccatcctaatgtttgcaacagttgctttgtatgaatcaatacaaaatagtactcttactgtgacactgcaaagcttatttttaactgaaattcctttccttgcagggtgaagagccagctgaaacgattggcacggcccatgtattcgaatccccctattcatggtgctaggatagttgccaacgttgttggggatccaaccatgtttggtgaatggaaacaggagatggaagaaatggcagggcgtatcaagaatgtaagacagaagctttatgatagtttgtctgcaaaggacgacagtggcaaggactggtctttcattctgaggcagataggcatgttctcctacacgggcttgaacaaaactcaggtgacatatgctttaaattttcacagataacacttccattcttctatcgactggtgatttctccatatataatgtgactgcaaacactgcaattcacacaatacactaagtattcttaatttgattcgtttgtatttgcagagtgataatatgaccgacaaatggcacatatacatgacaaaggatgggagaatttcgttggctggattgtccctggctaaatgcgagtacctagctgacgccatcatcgactccttccataacgttagctagacgaggattcaggtcactgctattgtggttaatccttcaatatgctgggatttttggttccttccagcttgagttcttagccaggattgtatatccggcgctacgtaatttggagataataatgaattttgtctgtgcaacaaactttgcatatgctttgtcgaatgtacactggcactatgttagaagcttgaaatatcgaattgaataataatgagactagcaataagccaaactaattccaattttacctggtctgcatggttcattcttttatgctcattgctgacaaacaaaactggcccaagccgtgccatataatgggtctggttagggagctttgtcagctgcagtttcttacagaattaaaagctccctaaacagtttttccagaattaaaagctctcctatatagtttagttttccattcagattataacttcagattttaagaagttatagttatagaatctaaattgctgtaaatgaattaagaagtcagaagccgaaaaactcataatattctcataagctagctgcttctcgaaattaattttaagcaaagtaagtaaacccaatatcactgaccagcctaccaagcactcaagcagtacacaagcgcatgggaagcccaaagctggcccagccgcgacgtgctgtcctagtcaacacgactttgacccgttccattcttctcttccatgtgacatgcgaggatttcacttgacaaaaaataaactgaagggaaaaatcgaggaaacagggaaaaaatgttgggctgtaaatacaacagtatgtgtgtgttttatgtgctggcccatctgctagagggcccatctagtcatgtatatgtaaataaggatagcaatacagagaaggtgaagcttccagagaaaattggctgccaaaaaacttcatggtatcagagccgaccggccggcggcaggcgacggttgaaccctagctggccggaggcgtggaggcttgagcagggtagagagtgcgcatcagcagcggcgcggaagagcggggccagcgcggcgcgtcgaggaggaagaagccgagcagctgcaggtgcggagctgctgctgctgcttggggctgagctcgcaggtgcatagctgctttgggctgaggcaagaaagaaagtgctggtaaacagctggtgttggtgctcctcaggaagaagtggctcttgctctgtagtggcggggtcacagcacagtgaagactttgcatctcttgtgggtgtgtgattggcaaggaaaccgaggtaaaagcacagctactgcttttgtgatattgactatttgagcaatctataggaagggaaaggtagaacagggggctcagatctgctagttgggtttctactggtttgcagtttcagaatttgcattatggcagaaaatcaaggaatagaacaagtgatgggtaaattggtggacatgctagcgaaaaaatttagtgaggcctcaactacaagcaatgcaattatccctcatactgaatcaatactgaagattgagttaatgcaaaacgaaatcaagttggagggtgtcaaaaattatttgagttggtcaaggagggcattactaatactaaaaacaaaggggttagaaggatatgtcacaggagaagtgaaggagcctgagaacacatcaagtgtagaatggaagacttggagcactaccaactctttagtggtggcatggttgttgacttcattaatcccagctattgctacaactgttgagactatctctagtgcgagggagatgtggaaaactcttactaaactatactcaggagaaggtaatgtgatgctaatggtggaggcacaagagaagataagtgctttgagacagggggagcgctctgtggcagaatatgtcgtagagttgaagagtttgtggtccgatttagatcattatgatcctcttggattagagcactctgattgcatagcaaaaatgaagaaatgggttgagcgtagaagggttattgagttcttgaagggtctaaatccagagttcgaaggaagaagagatgcaatgtttcaccaaaccactcttcctaccttagatgaggccattgcagctatggcacaggaggagcttaagaagaaagtattgcctagtgccgcaccatgttcaccaagtcccacctatgcaattgtacaaggtaaagagactagagagtgcttcaattgtggtgaaatgggacaccttatgcgtgattgtcatgctccacgcaagcctacttatgggagaggaagaggtgttgatagaggtggaacaagaggtggaagaggctatgctggtaggagcaatagaggaagaggttatggatatagaggtgattacaaggctaatgcagttactctagaagagggttcttccgggactacacctgacaatgttgccaactttgctcattctacttcaggtagttttaatcaagcatttatgtctatgaacacttctcattcaagttggatattagactcaggtgcatccaggcatgtcactggcatgagtggagaatttacatcatataaaccatattcatttgcacacaaagagaccattcaaactgctgatggcacatcatgtcaggttaagggggagggcatagtgcaatgtactccatccattactttgtcatcagtgttatatgtcccttcttttccagtgaatttaatttcaataagttctcttgttgataatatggattgtcgggtttcccttgatcgtgagaattgtttaattcaggagagaagaacagggaagaaacttgggattagtatcaggcgtgatggactttggtacttggacagaagagggacaaatgaggatgtgtgtgcactaatggcttcaacaagtaaagaagtgactgaggtattacttttgcattgtcgactaggacatatatcttttgaaattatgagtaaaatgttcccggtagagtttagtaaagtggataaacatatgctgatatgtgatgcatgtgagtatgggaagcatactagaacatcatatgtgagtagaggacttcgcagtattttgccctttatgctaatccactcagatgtgtggacgtcgcctgtggtttctatgagtggaatgaaatattttgtcacctttattgattgctattcccgcatgacatggttatatctcatgagacataaggatgaagtgcttaaatgcttccaaaacttttatgcatatattaaaaatcattttaatgctcgggttcagtttattagaactgataatggaggggagtatatgaatagtgaattcggtcactttctttctttagaaggaatattacatcagacttcttgtcctgatactcctccacagaatggagtggctgaaagaaaaaatcgccatcttttggagatagctcggtcactaatgtatactatgaatgtacctaaatttctatggagtgaggcagtaatgacggcagcttatctcatcaaccgcacaccatcaagaatacttggaatgaagacaccatatgagatgatatttgggaagaatgaatttgtggttccaccgagggtgtttggctgcacttgttttgttagagatcatagaccatctattggaaaacttgatcctcgagctgttaaatgcatctttataggctattcatccaaccagaaggggtataagtgttggagtccatcagaacggcggacatttgtaagtatggatgttacgtttagggaatctgttccattctatggtgagaaaacagatataagctctttatttgttgatcttgatgatttaactagaggtgaccatgatcaacaaaaggaaggtgaaatcttgggtctcaaggagaatgaacaatcaaagggaaagattatggttggtgaaattccatgtgctataggtgatcctgtacaagaacaagaatggagaaagccacatgaagaggaaaatcttcaagtttacacaaggagaatgagacttccaacaactcaacaagttgaagttgatgatcaagtatcagatgatcttactcatgtgcaagtgtcttcggagtcagggggagaacaaatagaaattagagaagaagaatcaaacttgccaattgccataagaaaggggatgagaagcaatgcaggcaaacctccacaaagatatggttttgaaattggagatgaaagtggtgatgagaatgatatagccaattatgtatcttacacttccttgtcatcgacatacaaggcctttgtggcatctctaaattcagctataattcctaaggattggaaagaggcaaagcaagacccaaggtggcatcaagcaatgctagatgaactagaagctcttgagaagaacaaaacatgggatcttgtatcctatcccaatggaaagaaagtggtaaactgtaagtgggtatatgcagtgaaacaaaatccggatggaaaagtggagaggtacaaagcaagacttgtggctaagggatatagccagacatatggaattgattatgatgaaacgtttgcaccggttgcaaaaatgagtacggtaagaactataatatcttgtgcagttaactttgattggccattacatcaattggatgtcaagaatgcttttctacatggcgatcttcaagaggaggtatatatggaaattccacctggatttgctactttgcaaactaaaggtaaagtattgagattgaagaaatccttatatggtctcaaacagtcgccaagagcatggtttgatcgatttaggcgtgcaatgtgtgctatgggctataaacaatgtaatggagatcacacagttttctatcatcatagtggagatcatataaccattcttgctgtttatgttgatgatatgattatcactggaaatgattgctcggagataactaggctgaaacaaaatctaagcaaagaatttgaagttaaggacctaggccagttgaaatattttctgggtattgaaattgcaagatctcctagagggatagttctttcacagcggaaatatgcattggacttgctcagtgacacaggtatgcttggatgtcgcccagcctctacaccagttgatcaaaatcataagttatgtgcagagtctggaaatccagtgaataaggaaagataccaaaggctggttgggagactgatatatttatgtcatacacgacctgacataacttatgctgtcagtatggtgagtcgatatatgcatgatccaaggagtgggcatatggatgctgtctataggatcttgagatatttgaaaggaagcccaggtaaaggcctatggtttaagaaaaatggacacttggaggttgaaggctattgtgatgcagattgggcaagttgtcctgatgatagaagatcaacttcaggctattgtgtgtttgttggtggtaatctagtatcttggaggagcaagaagcaaccggtggtgtctcgctcaaccgctgaggcagaatatcgggcaatgtcagtgagtttaagtgagttgttatggctaaggaatcttctttctgagttgatgttgccggtggatactccaatgaaattgtggtgtgacaacaagtcagcaatcagcattgctaacaacccagttcaacatgatcgaacaaagcatgtggagttggatcgtttctttatcaaggaaaaactggatgagggagttttggaattagaatttgtaatgtctggtggacaagttgctgattgtttcacaaagggtttaggtgttaaaaagtgtaatagttcatgtgacaagatgggtatgatagatatctatcacccatcttgagagggagtgttgggctgtaaatacaacagtatgtgtgtgttttatgtgctggcccatctgctagagggcccatctagtcatgtatatgtaaataaggatagcaatacagagaaggtgaagcttccagagaaaattggctgccaaaaaacttcaaaaaaaagtcgtcctccatctcaaacacgtttggtgggtcagcgtagcaaagcagtacaaccactgggttcgtagaatcgcgtacgtacatcatgcggtgcacgtgaggagaggaggcagggccgctctcaagtcggcatcgccctttcaattatcacacccttacgtgtcgctgccttttctttattttttttctcaccaaaagctgatgatgaaacgatacctctcccctccctcctgtcctctcctttcgcacccatcaccaccaccatacaccccaatgacatgtgggccatggagttaacgccgggtcccaccacgctgcaaaggttgggggccaaaggtgagagaggaaaaaaaaaagcctctccaccttctgtcgcctcgggggagggtactgacaggtgggccctacggcccgcgtataccgacgggttgttgtgcagcatccgagaagagagatcacgaatattggaaattattttttttggcatcgaccccggattatgcgagtgctttaggggtaagggcggaattaatttggtgggtggagtgattaatgataaggacgcgcccggggggtggggcccacgctggggaaaccgccttgtgttgcaggccgccggaacggcaacacacagctgtcgtttaggcccaccacccaccccacttacgcggctcccacggcacctatttttttcttttttttctctcgaattttatataattattttatttgctccttcaaaataatttatgcccctatttttccaaataactcaaaagaaaaagaaggtatactctgcgatggcaagggcgtgaaattataccaaaaaaggagggcaggagcctaatattgacaataattgagccgcccatgtcggtcatcacccaaaccgggccactcagcggtgcagcgcggggcccacctcccctccgagtagaccccacaacaacatccatccgtccgtgtaaagcaattcctgcatccgacggcgctcgtgcggccacgcacaacaaaaagatctcctcccccaacacccgacaagcccagtgtttttcctttctttcataaaaataaaacaaattattttattttattttaataaaaaggaaactgaaccacgtcgtgtggcactcgtactcatccatctccgattataaaagacgcctcttagccaagcgtttctcccccattgtgttctctccccccacccttccaatcccaatctcttctcttcccctctcgttagggttaggtttttattttctctctctcgatttctctcttcgcttccacttcccaaaattctcgagtcaaacctcgtggcgttcggccatggcgacggcggcggtgctcggatcccacgacgccctcgacaaccggatgcatctgggggccttcgccgtgtccccggcgtcgaagccgaggcggaggcggcacagcaaggcggcgtcgccgccccccaaggtggcggcggtgagctcgccgccggtggttaagtcggcggcgagggtggcgtcgcctcctcccaaggctgcggcggcggcggcggtgcctcaggggcgtcgctcgccggtggcgaggaagcaagggtcgccgacgaaggagttgccgaagcagaggctcgtgatgggggagatccggatcctcaagcgcggcgaggagccgccggtttcctcgccgtcgcctgctccggttgcggcgcaggccgcggcggttgaccagcgggcgccccgtgttccggctgtggcgcaagccgcgccgactgaccagaaggcgcctcgccccgccagatcgaagcagcagcagcacacggccgctgtgccgacgaagatcaagtccgtcgccgacgcgccagtctacgccggcccggccttctcctcggcttcgcctgagccgagctccctccccttcccggccttcatccgtcgcgccgaggccgaggcgacccgcggcctccgctgcctcctccgcatcggcgagctcccttgacggcctctctcaccgccgtcttccccggagccgtgagccgtgcacgctcctctcctcgtttctcctcctcttctctgatggatggattgcttggtggtttcgatccgatcgaaagcttgtccggatcagatcccggctgcgttccgatcaaactctcccggtattttttcagaggacgagtttgggggaacgcatctgccggtggttggatttggtagtggttaggttttcaaaagtttcgtggtggaattatgttgggggtttgcttctacgaagaacaacactaggttgattagttctttgtcttttgagtttggtttttaggtggtgtcttggttgggaaaaattggggttagtttggtggaaatttaggctggcttggtgttgctgatctgttagtacagcagtagtggtaataatagtagaggtttggttagatgaataattcgtcggtagtgattgtgatttgtggtttggtgagcgtgagttcaatgtcaggtgaagaatagtagcactaaattcgtgttaggtattatgtccagtgtcaaaggcaagacatatatagttcttattatcagtaattaagttatgttaggtgttatctttctgttcgtctgtaagatatatatagatcttatcgggtaatcaaatcaactatgtatcagatcctcgcagtggtgaatttcattcaacacatcagtggatgtttggttatcttcttttttttctcatgctgattagctgtggatttgtgttcttactttgtgcaagtaataagtagactacccttggattctcaacgaggttgcttcacaatcatcatatgcataccaagatttaattaagaactgccacttgttatacccgcagtttccgcttaagttccgctgtgtatttgttcttattcggatgataaactttgcttgttgatgtggtaatcgccaaattgcttaaattagtttgtgtacgcaaccgggtaggcggattgctggcgtctaatctaatatttcaacttgcaaattgaggtgcatcttgctttaatccaagtcctcttgctgaacaatttgctcagtatgatcgatcccagtagtagaggtgattatccccacctgatgttttgggtacgtttcagatgggttggggcgatataggttctcattgcgtatttgcaaacgataaataatttgtaattaaaacttctaaataatttgtaattaaaaatttatatacgtcgtcttagttttagcgatctaaaaatagaaaataaatttagataaaaaaaaccttaaaatcaactttaaccataaacttaaaatcaacttttaacctaaaatttaaattttggctgctaatcataaacggaaagttggtgctgataatttctgagagttcaatacgaaattgatcgctcaacttgatagggtcaggtcggcgacccaccggaagccgctggtagttgagatagctgaggtcaatctctctcctggcagcgtgtggtggcagactcgcccgaggcatggccaggaagctgcatagcctacgtcgtttcgacgtggcactcgccctcgcacgcgatgcagccacagcctcttgagtttcggagccacacaagcgatgagccgatgagcatgtgagagctgatgagttaaatttgactccgttcctattactgccaaaaacaaccttaccaaaaatttgtgaatgtcaaattttaattaagttggcagaattaccaaatttagtaggatggaattatgttgtgccaaaaaattttatatgttaccaatactagtatttaagtaacaaactaaatgtatctatatatttaaattttatcaaacaatgatatgatttaaaatgaaaccaatctaaaccggccctttacctaaagttgggtctactttgacggagttcttctgcacacggtaaaatacggtggcttcaagccttggacgtgtaccagccaactactagtccaaccacgactgacggcacacggcacggcatggatccgtgctttggtcaaaaagccgagtcaacgcccaagacaaagcaagcttactagtaatcctcatcacttgatcactagtactgtagtaaaaatactgcgatcattgcaagtagtgcagtttttgaatttcaacaggtcaagcacggagcagatcattccaagctttgttataagcaagcgatactcagtaaaaatcatgagacgagggcacctcgtcgcagtatcagcaattgcagtcctggagttttggatcgcatggataagccaacaaccaaatgacagggcaggacaccaaggacgccagaaatgcgtcagtcttggagtatgccgttacataatctcgaatgcaaatcatcaaatttggaccacctgtgatttaacaataaccatatagaggaaacaaactgtcccagtagaaatatgacgagaaaactgaaagcaagcaaagaacaaaccattacaatttacaaatacaataaacagcaacagccagcaaacaagtagtacaaactagatctctgcaaccatgaaccggcaacggcaagagataacccaaggttaccaggattaacagcaatagattaccgtgattatcagacacattctttcaagttgaagaaacagtaagctcactcagctgtttgaagccgaggctaccttttatagttctttttagtaagtgaatcaccaaggctttgagattagttgttcaactacacattatacatatggaatagcacgctggaatgagtcagatgcaaccacccagcaatgattgtaaaaaacaactggaaaaagaaagccacacaatcaatgaaatattatgttgagatgtcatatatcatagatcaatcatctagtaatttatagcataagggtcgtatttaagctacttagcaatgttaaaagacatccaaagtatagctgtcagatgcaaaacatgaagactattaattattactccatacaaaataaggagagtttcttatatgaaccaaggtaggagttggagttctggtgcaaagaaaaataagtataatcactatattgtgtagcaactgcatcaaaccatcacaattctgataagtcaaaaaattgatctaacattttaggaaaatgataccaaacacgattgcaacagacagcagtactaagcttacatcttaacagctaaatggcagcagaaagagcaactaaaatgactcaaaatgtgaataaaccaattcattctattacatcgtgcaagctgctagcacatctctccataaaacccattgataaatcctagtaaagcttacaatagttattcagtctttgtataccaaaagatgacatgagctaagattttgtgactacaaactttttgatgtccactattctcacctctcatttgagtaatacactctgcatcgggatgagcttaatctgctttcacggatgagaaaagatagtggacgaagcagaatgatgaaatgaatcccactgttccagtagccagcataatagcaataaccatgaagagtgagtagccgagatagagggtcgccgacacaggtccactcaagctctttaggtcaaaaacaagatagttgatcgagtacaagaaaatgtagatcgccacagatccagatgagaagaatgatttccaccaccatttccaatcctcgacacagagatgcatgtaggtcagaacaagggaaacctcagcgcagacaataacaaggagcaacaggacgatgaagaggaatccaaagacatagtacacacgccccatccatatgctagacatgatgaagaagagctcgatgaacagggtaccaaagggcagtgtgccagcgccgagaaccagcaaccaggatgggtacttctgaggtgggatttcacgagggatctggttagtgcgcacggggtactcaatgtgcggtgccttggcaccgaggagtccacctacaagtgtaagcggcacagagatacagaaccagagcagaatcaatatgacaaacaacgagaaggggatggctcctgtgctttggcttccccacaacaggaagttcagagtggtaaggatcaggaatgcaatgccggggaagaagcaagctaccctccatgaaacagccatccaccctgtatgatcaccgcacttgattgtcttccacacacgaacacccacatatcctgccaaaattccaagaaccagatagaagaacagcatgcccgtgatcagagtaccgcgggaagctggtgacatgaacccaagcgccgcaaacagaatggtcaccactgccatcccaaggatctgaacaccatccccgaccataacgcagagcaacattgggttgcttggcgcgcggaaaacatcactgacaacaagcttccacccagacagctcctcgttcatctgcgcctgcgcttcactgtcaagctcctcatacctcgtcagatcacgcctcacggtcctcagtaatatgacaaacacgataccagcaaggaaagcaatcaccatgagcgagttgaggatcgagaaccagtgcaccttggcaccctccatcttgaggtatgcgtcccacctcgagggccacttgatatcgctctcgacgaacgacacctcgtaggtgtacacgatgggctcgttctccttgatgctcatggacacggtggtcgggtcgcacttgatgctcctcgggtacttgccatacatcttgagcgacttgacgtcgtcggggttgtgcttgatgctacaaggcacgacctcgaagccgacaaccatccagccggatgacccggcggcgccgccgctgccgtccttgccggtggaagggaagccgtcggtggcgtcgccggtgcccatgacacgggcgacattggcctcctcgtacttgtgcacgaggacggtgaactggaggtggttgaagacgtagtagtcgacgccgacgcggatgccgacggggtagccggtccatcggaggaagtagtcgtccttcttggtgtagcggatggcggggaggttgtcgaggatgaggttaacctggtacatctcgtcgatccgcttcttaaggaggttgaaggcgtcggcggcgagcggcggggagcggcagaggaagaggtcggagtcgttggcgtgcatccggaagcggtagggggagttctcgatgcggtcgcccatgaggagctcgccgaggttctcggcgctgtccttgacgccgtcgggaggggtgcagaacgggaggctgtagtagctgtaggggatctcggtgtcgatggaggtgagggagttcaccttcacgctcagcggctcgccggggttgtacttgtgcgggtagctccccgggaggtagaacccgtcggcgcctggcgcggagagggacaccgccaccaacgccgccgccgccgcgacgaggaaggggaggaggcgcgccatggctgggcgcccggcgggatctggatcggcgtgtggttttgatctggatccggtgggggggcgaatgagacggggaggctttagggttgggggaggggaggcgggttctccggcgaggaggcggcggggggactcgccggagacgggggtgtcggtggcggtggcggtggagtagatctgggggtgggggcggcggaatgggggggtgggcgagaggggggagggtgtttggttgggtttatacgtggctggagatgatcatccccccttggttttgcgatgaacgaacgaatggatgcgtggctaatttgccgtgtcggcggcgactcggcgtttcggcgaaaacgtgcgcccagtggaacatgggtgtgttttcacgccaaaattgaaagtttgattgaaattggaacgatgcgacgaaaaagttagaagtttgtgtgtgtaggaaagttttgatgtgatgtaaaagttgaaagtttgatgaaaaattttagaactaaactcggcccatgtttgaaatcatgggtgtgttgttcacgctaaaattggatgtttggttaaaattggaacgatgtgacgaaaaaattgaaagtttatgtgtgcagaaaagttttgatgtgatagaaaagttggaagtttgaaaaaaaatgtttggaactgaactcggccaatttcttactctaaaaccttactccctttatcccataaaaaattatcagaacacatcctaatactataaatctggacatacctatgtttagatttattgtattagaatatgtcacatgcagttttagattcgtttttttagacggaaagagtaggcattattactaggttcgaaggatttctcgattcttttgaaacaaacactatttatgtacttgattcatagaattcagaggaaagtttttcatagaaatactaagccaatcctccaaaactccttcgaaatgcactgattccatatgaatgaaaaatctgcttcattctcttttattcagctcgttggaggaaaaattcatgtgttccaatcttttatattgtgcgtatgttcctatattatttatgtattttttcttttctgtgatttggaaatcatgtgaaccgaagaggcccttaaaacctaataccattacgtagtaccaggtgccactcatttagtattagattactatattatgagattggagaagtattgttgtgtactcggaacatgtttgaaaccatttcttttttctaaaactagttattttgtttgaatattgttgctacagatacgatttacttgtataactcatatataactaaagatatgtgatcatagaccaatcaaaataaagcatgttcatttgcaaccgttgattagattcatccgtgggtgagtcagatggttaggtcgtttgtacagtaatttcctcatttgaatccagttgaactatgctctttttttttcaaacttgttggaaattcgtactgtcgagggaagaccctcaatagcgggaggtcgtgagacccccccccccctttcgtgagttcggccgggagaagaagctcgcctctagaaatcacgaatccgtccctggggttactagctagcttgcacgtaattaaattatacagattcgggccgctgagaagcgtaataccctactactgtgtttgagattatagttgagtattacaagggttcctcaactctggacagcactctcactcttcttttcctagagttcaagcctccaaagtccccctccctcttctcggtgggcaaggtcctccttttatatctcaaggggataccacatgcaccgcctttacctattcttctttcgggtggggacccaccctatcttgaccggaactcgacccgtgccttcgcctggaagctaagccacagcttgtccttgagtggggcctagcgccgtccctcgcctgacacgggggacagccctgtcattccctcattaatgggtgaagacttgtggtgccgccgtccgaatgaccctctgatgggacgtgtcatacctacctccactccaccggaagcagacgcgacgtgggagcacggttgtcggtccagtcagatgtgaccagcgtcaggccggttacagaccggtcattcttgattatggcgtgtcagtttagcactccgcatgtctgcctcactgtattaaatgagacagggggcagttggggcgttgcgcgtattaaaggaggctcagcctgggccccctcctcgctcgctgcccccgccaaatggcggctgggcgagggcctcggggcaaagcgatgcaagggcccgaggggcatgacgtggcaccccgaggccgcgaccccccctccccggccgctccagcagttcgcggactgcgggggcaggaccaagctgtagggacacacggcaggataggaaggtagattctccacacttcgcataccctcgggcccatatctccgacacgtactgtggtacttctaaaagataaaggttaatattcatcgggttattgaaatatgttatttgttcgatgcttaagattctatatctccttaataaactttcttcgactacatttgttagaccaagttatttattattatatatattttaaattgtttaattatatctataattaagtagataagatgaggcaaaaattaaacatggctagaaactcttggatttacattatgcaggtactatcaagattttttagtttgtgttgatttttttccatgggagttaggcatcctatacttctcctgcaaccgggagttcgtttgaaatttaaaatgtttttacttctcacatcttaaatgtcactgtcgtcattggatgttagtatatggtgcacggtcaaggtcaatggtttgcccgtatgcccgtattttgaatcgacgcacgaggacacgcacatggttactgtcttttatagctggtaaacgaggaggacactggtatttcattggactcctttcagttagaaaaattaacatcgtttaaacatttccaaaggcaataagacatgactttagcaattcaattcttttgcatgaataaagaacagttacataaatgtaatattcccccatttcatgttataagtcgttcgattttgtacgtagtcaaactaagtttgcagaaaagtatagaaacatttacaatacaaaacaaacatattattaaaatatactcaatgttaaattaaatgaaactaatttgatgttataaatatttgctaatttttctatcaatttggttaaacctaaataattttgatcaggaaaaaaggtaaatgacttataatataaaatggagggagtggcatataaacttttataacaagacaattggctatgtagttttatatcgaacctagttatatcctacaccataaactacgatcaaagttagctaacgatagctacacatatttaaaacaacgtttttctgtaacaatagggagtaaaataaactcaagtcatttttactctcctgtcacaagttctatgaccgatggacttgaaaaaccataatccccttcaacgctctgtcaagttctacagcatccatcacttctgacggtagtgaagtactccctccgttttaaaatgtttgatatcgttgactttttaagtacgtgtttgaccattcgttttattcaaaaaatttaagtaattatttattcttttcatatcatttgatatattgttaaatatactttcatctatacatatagttttacatatttcacaatttttttaataagacgaacaatcaaacatgtgctaaaaagtcagcggtgtcaaacattttgaaacggatggagtataacccacaatctaaacgtaaagcctgcattctaaagttttaatggatgaaacatagttgaaattgagtttgtaattgtcatggttatggataccacatacctaatagtagttgactaaatctcggcaggacccaccacataccatgtcctatacggaaacaacctacggatataggagggagttccggataagaaaagacagccagagttctacatggaaacgacaaggactactcggattgtatccatattggtttccctagttctacttggacaaggggacacctatgggtataaatacaagcccccctaggaggacagggacacacagactcaccatgagacgatcaacacgatcaccacgatcgggacgaccacctcatcgacaaccaccatgaaaggaccatggaagacactcatgacaatcaacacacgtccaccagaagccacaacatacaagcctacatacgccaagacacaccgccggatatcgacttcagggataggcatggctattcccctacggtgtctccggataccgtcaggagatacgaaagcgctatctctgatctcgccgggcacggattcgaggaggaaggctaccctgttgtcgactacgagtcagaccttcagaccgacatgtcgacaacagttagataggctatccacatattgtactggtgtgattatggtgaataagagcaataccggcttcggccaacaggatgtagggttattatctgataactcaggggcccgaacctgtataaaaatccatgtctccatctcttttacctcagtctcgcgtatatcctagcattgatgatccccatactatgcaaataccagaatgacgacatcaaacgtcgacagtaataattattcgaggacatacacgaatgcattaatattagaaagttgataagtaaatctaaaagagtttgaaaaatatcggtgaagaaagttttcataaacatggcgctgtttacgacttaggaaaagtccccacgataatctcataacgataataataaaataagtcacaagtgtggtcacactgttagggaggaaacaagtctgaaactatcctgtagacggtccagctgcccttcaccaatcattgtatgcgttagttcgtgcgtcataggattgttgtaacctgatttgcgcgtgatctgaattgcgcgtgatctgaagttccttagacaagtttgatcacatctaattttgtttaaatcatttacatattaatttagaggtaatacatactctgaatagattgcatctacttacactacacccaatacacttctctctttctctcatatttcttgatttttgtgtagaggttgtcccttacatgatgggtggctgctcctctctcttatcttcttttctctcctccacatcattatacgagtctacatggtatcttgcaattagtaataaaatgtttatagtacttgcccttagtaccactactcacaaataattcatccgtttcataaaaatctaatataataatagatatgacacattatattgttatcaatttagatatatatccgtttagatttattgtgttagaatatatcacattaagttatatgttcgttttatatgggacgaatgaaatacggactatataggtgcatctatcaattggatggatggggggtggggggtggggagcttttactgcagatttcaaggcggcaacaaactctgatgggagcgatgagccgatgacaccggccatatgcaggtccggcatcgcagtcgcgagggggagaacatgaatttttttcatttttaatttttttcttttaatatttacagaaataatctatcggcgcaaaaaattataaaaatagaccctgccgccctagtggatggcgacaagctaacatggcagacggcggctcgacggcaccatctgccgccgtctgcgaaaattgcatttagcctcttgccgccctttgcagccctaaaaagcatttggctggtactttttgcatctgggcgagggtggcaaggggcccagatgcaaaaagtaccagccaaaaagtacccggctcgggctggtttttttgcatggaggccctggcggcaagggttttcgtgcaaaaaaaaaaaccctcctttcctgtctgccgtcaccgtccgtccctcccctgtttgccacgtcagcttgccgctctagtagagggcggcagggtttctttttgtaatttttttgcgccgatggattatttctgtaaatattaaaagaaaaaaattcaaaaatgaaaaaaattcgggagaacatcacatcgcactcgctcgccacacgcacacgcagcgtgcgatcgcgctgggctttggctttggctgcgcgtgcgacggcgacacggtgtgtgggtgctgggcccgggcggtcacggcacggaagtagtagtggcacaaagcccattggcaactcgtgctcggcccatcacaaaaccgacccaaccaacttctccgattgcagttattccaacggtatatgccgtgaccgtgattagttaagttattattattctatcctatagtttaacaaatggtttcactcattcatcactcatcatatcacacatccaacggcccaaaatcatccaatccaacacctcagattaccccacgtctccctctcatcccctcccctcctcgcacccatcctcctcacgccggaaatcacgccgcattcaccctcccgcgtctcgctcggctcttccctcctctctctctcgcactcacccggcgacgccgacgccccacccgcgcgcggttgatcccccgtccaccgctgctcgatttctctcctctcccgcgccgcccctccgctgtcgtcgcatccctcacgtgctgcccctccgtcgtcgtcggatcgtcatgccgcctgccgccgccacttgctcgtggagatggcgatgatcatcgaaggtgagggtccctcgaagtttctcccctctaaggtgaagttctgtacggcgtcgtttgggctccgattcgagtgtcgcggtgcggggattgggtggctagggttccggttcgagtggtgtcacgattgactggtgcttatttccgtgtccaccccgaaccgtgctacggagaagcagaacggcgagcagtgaagagctcgagggagggttcagtgattactaccgcggtgctgcctggctgctacctctttctgcctcttcattccaccgcatccaccagcttctacttcttcagtccttggctgtcggatcgggctaccaaccagtcaacaacaggtgagatactgagaatcattcctccacaaaagaggtaaatctactgattatatgtctttgggttttaatggtgggtttggctcctgattttactgctttatttgtgcagatcctccctatacgagatgggtaacgtgaagatcattgctgccacatatgggtggaaaggtggtttctgatcttgcttctgtcgattttgcaaatttggacgtgcatgacatatgtttgatgaaatgcccaaagggattaagaatgggtttaattgtcaattctagcaattcagacgagttaaagtaattgttttcatcctcctcagccaataatttctcaataggtcacactttacaatctacttgctcattgtaaagttgttttgttttccaataggtcacactttacaatcaacttgctcattgagcagtagcatattctgatatgtttaaaatgacaaccctgcactggggatatgttagctgagggcctcatcgttaggctggcaaaaatatcctctagatttacattgcttgaaatattttttttggaaaaatgctgcaacttccttatgtgcaaaccttggggccaaaatgtctattcacttattctcattatatttattggtccctttcctcgcacgtttacaaaattacggcccattaccttctgtgttgcagaatgatgttctcatggttttttaaaaaatggtgataatgatagggaccatgatcgccacagggatcaccgtgatagaagcaaaagaagatagcatcgtgattctgaatattctgatgatcgcgatcggccttgggacgatgattctgaaaggtgttgtgactaaattcctagcctaagcaaatatattgtaactgtactttaatatgggtgtattttattttctaaacctgaattatgagatgttagcgtgttattttcccctgaaacataagttgttcatctaacttttgtccgaatttactaaatgtactaaacgcctggtctccagtacagatcaataatcaatggaatattctgcactaccctagagtgaaggggtatatttctactaaatccaatttcttttaatgctacaagaggctagaaagcaacattattcaggtaatcaggttgttggcatatttgaactaaatccaatttttgaatgctacagtgctgcggaggctagagaacaacagtattcagtcctccaaattagatgttgcaccattgttggtgaccggctgaccgacatgaatccatcgccactcagttttaagtttaacaaagttgcaaggaagttttcaagatattggggacttttatcagtttgccgactccacacttttttggcaccgtgagctctagcatcactcattcatctatgtcattgcagttttggatgcacactgcctaattagctgtttttgtgatacttgcattatttatcttacagcagaaatcacttcagttcctctcctgcacatgaggactgcatgtttgtacaatgaaagtattgtggggttttatcaaggtattgtaaaaccagtaacaaatgcaatgctcaacaattgttctgaattctaatttttgatgaatcttctgctcaaaagatgttaaaaattataataatgctcgagagaatgtagatggctgtttccgtacaagacttaaattttacgataagctgttgattactggcaatattctccattaactattgcaatgatatctctgacaaagtaggtcaagctcttcagtctaaattacagtaagagttttgatgctgtgcctcttataccttttgccttcatactactagcaccatgtctcttgttcttggtttcccactatcagtcactccagctaatttgtgtttgctttctattttttaatagatgcaacaacgggaagattgaaaaggctgctgcctgtaaggtgttcgaactcacaacctctggaatttaaatgtatgaaagtgtttgaatagttctgaaaatttatccttgcttttctataagattgagagggctgcttctggaggaaaaagcacactacatgggcaatgacaatggggtagggtccctcttttgcattcacggttttgcagtttatcctttcggttgatttcttgcctataactgattttttttaaattcctactcgaaatcatgtaaattagtttggtagtatatccaaattatgctaatgcgtgtgcactgaaatttaaacttggtcatacagtcatacctgatgtattagcttggatgtaatgtcagtatgtgtgtgttttgacagagagggattgaaaggagaaacactcccaaggagaaggagaagagcgagggaaaacaccagggtgatgtgagcaaaatctaatcgggaagcactatatcatactgtatgatatattaatacactatgatattggtttcacctcagtgtgatattgaagcaacagagattgttttatcaagctatcaggtcaaaaaaaaaatgaaatcctattgtcagcatttcataattttagtactaaatttttattttctgaatcgattcatgtatatggttttaccagactgaagctcttgatttagagaaactttgctagaataccgtagcacaagccgcagaggatagaaaaaatgatgataccaaaggtgcttacaagcaatgtgctgtcaaacaatcattgtttaactttatagtataaaattccattaccacttaatatctagctaacctttcgcgtttgactgaattaatttcacgtgttagtagcagcagtagataatttttttattttgattccagattttctttctcttctgcaccctttggagcatttaccaggtaaattgatttttcttttggttaatagataaatatgtgagcatgctttgttgggtttttttagttgattttgggttctgtcatcatagtttattttccagtaaggatgttttgcccacaaataattatatggtcaccaataagtgttacagcttataatcaactgtggaaaaaaaaaccataggagaatttgtttcacctcagtgccacacaattgaagcaaggcattcaaaatggaataagaaaagtataagctgtgcagttcaacaaatctgaagtatgtggttggcacatgtaccttttttttacacagaatcaatatgggttgtggttgagcttgcttatatcttgagcagctgagaattctacagttgtgaattatggtaaacatatcttatttgacttgtaccatgagtccagtgaacctgtaaccaatatgtttgtttttaacttcatatgttcataatttaaattttccagtgattttaaaggttatgtccaaaatttaaatgttccactgatttaaaggttagtggacttttagtgctacagtcttacaaacttttggattgaaaaggatacatgtttctattgttaacttaagcttgctgctagcacatcttaattcaacattcctacgtaatttgtcaccctttctcagatcctccgtatgtttcaactaaatagaacatatgtactccatctgcctcaaattacaagtacctatgctattttctaaaaaagagattaaggttggggcgtgagatggttgttattcgttgatatgagaaaataggtacaagtagttgtattttgagacaaatttgaatcttagaggtacctatattttgagacggagtgaggagtaagttattactacatatacaactgaagaattttcttcctattggtaagagctatgtttcatatggcttctctcagcatttcatttccattggctcaccagtactagcatgtggcacatttgcactgcacgggtgatgaattgcggacttgtgaggagtccagctcctccaagaaaaatgtggtgatggattgcggacttgtgaagagtccagctcctgtaaggaaaatgggttgatggttatgtaggatgccttggatcttatgatagtatattaaggtataggcgttgacagagataagcaaatttgttaagtgaaattctgacgagaatatgaataatatgaaatcattattcaagccaaatgtacataaaaaaacatgaatctttggttggcgattcaaaatttatatatttaaatacctatgttgccagcatatgcctcttttgactgattgattgttgacaaatatagccgtagcgttagcacgggtggattaccagtagagagaagttcactaaccaatcatgtcaatgaggattagtcaagactgatctggattggaacggcaacctagtcaacgaaagactgctgctgctgctatacccggctgctaaacaggccaatttggtaaatagtttagtgggtggaaattgtcatcgcgtcactttcagcccctccggttttcccaattacaccccccccccccccccccggcctgcacggcatgaaagaaagcaactgattagtagtacacctcaatttcaaaataagtttgaacttagagcagtctgaatttgaagttgaggtaagaaaagaaggtttgaatttggaccccaacgaggagacggtaaaaacacggcaaaggcaagaaggcaaaaccaaggaaaagaagaagcgaaaagtagtagccaagcagcagccaagccaacaaccgcacggctcgagatccgccgccgccgccgccgccgccgccgctgccgccatggccaccgcgtcctcgcaccaccgcgcgcgcctccggtcccgcgccgcgccgctcctcgccgtcgtcgtgctcgcggtccttgcgctgaccgccatcctccgcgccagccgccacgacttcgtcccgggcgcggcgcgcgccgccgccggagtcggcggcggcggcaacaaccacaccatcgcgcagcgcaagatcctgctcgacccggacttcaccccgcggctcccgcgccagagcgcgctctccctctccctctcccagcggaacgcgctcccgccccgcaacgccgaccgcttcccccgcctccccgacggccacctcaacatcgtcctctacgtccacaaccgcccccgctacctccgcctcgtcgtcgacagcctctcccgcgcccacggcatcggggaggcgctgctcatcgtcagccacgacggctacttcccggagatggacaagatcgtgcagaccatcaccttctgccaggtcaagcagatcttcgcgccctactcgccgcacctcttcccggaggccttccccggcgtctcctccggtgactgccagggcaaggacaaggcggccgagaagcactgccagggcgacccggaccagtacggcaaccatcgctccccgagaatcgtctcgctcaagcaccactggtggtggatgatgaacaccgtgtgggatgggctggatgagaccagggacttcgatggccacatcctcttcatcgaggaggatcattacatcttccccaatgcgtaccgcaatgcgcagctgcttgtcgacttgaagcctagcaagtgtccccagtgctatgctataaacttggcgccatcggatgtcaaggcgaaaggggaaggttgggagagcttggttgccgagaagatgggtaacattggctatgccttcaacaggacagtttggaggaagattcatgccaaagctaagcagttctgcacattcgacgagtacaattgggatataacgatgtgggcaaccgtgtatccgtcgttcggatctcctgtttacagcctgaggggacctaggaggagcgctgcacatttcggcaagtgtggcctgcaccaaggccaaggcttgagcaatgtctgtgtggataatggcgacgcgacagtacaattagatgccatcgataaggtccctaacatcaaagctaactggccagtacatatcatcaagaggcaggaggggtatcaggctggcttcaaaggatggggtggctggggtgataagcgtgatcaggagctctgtctcagttttgcatacatgcaccattttaaagacccatcatctccttgatgcagggtataggcacacggattttggcatagctgccgccttgttgtattattgttcggtatcattcattcttacacacggttcgatataaatagcagtcttccctttcccaattttgtagaatagctctttcttcccagttgaaagacattgctgttagagttggatcaatatcccaaactgtatgacttaagtagttaagctcacagatgtggataaagtttactcttttaagcacatgagttagcatttatttgctacttgagatcttgccatgtttccttctgtctacatcattaatgttcaagtgttcttactctcatattcattgtactactatgaatagaaattactatcatatctgtgtcatttattatgacaaaaactgacgtgttatatttgtgtgaagtgctaatttgtgtacatgtttatttttaggcgtgcttactggtcgttgaccagttcatcttaccatttgaagtgtactgatttatatttccattatacagtttgagaaaaatctcagcactcctggattctattaaccattcatataatccttgttggtgatatgatcgttgtcaattaccttttattcattggtaattcatttactttccatagtcttttttaggtagtgaagtttagatatatacaatgatgaccaccaggcaacaaaattgtttttttttttctgaataagagaaattggggggtttcttttgttgcagtttgctgcgagtggataaccgtattaattagttattgttagcatttactaatatcaacttatgatgaagctgaaactttaaggtttttagcatactttatgtgctgttattaattgctgtgagtagatagaaatagtaaagtaaacaagaagatagcctactaatcaggaaatagctcattcctgcagtaaatgatcacatataaacagaagaaaagaaaaagttatttaagctctcttgactagcctgaccagtgtttcttaattgggttagaccagcccaattgtctttgcataggatgggaacatgttttcacaaaaataagctgcttaatagttataaaagtgataggctgatgcaatttgggctggctgggctaagcctcttttgggcttgctccacagagcctgatcattcccaggttgtcagactacattttttggcgttgattgtttatatatgcatggtatttagtctttacagagtttacagcatttattttattctaaagtggaataaacatcttgctgtttttttgatgtattaagaactaacctaatctataccaaattctgatgatggatcttaaaatcagttttacgtatacatattttttccagcataccgtccctgatgggggtttgccaattttatctgctttgttagtactcaaaccttttcagatctgtagaactgcttgctctgttcatgaacaagatgaagtgacacgaatccaaagtaagtttattattaactttgctctgctattcttctactcctgtgctgctttggtttatgttaggtctcaggatgctgttatgcttagcaccagaaagaaaattccagacaaagtaagggtgcagataagtaaataatggtgctgtattttcaatctttggttttaatgctggattgcttcagttgcataattttaggttgtaggttgtggatagaccaagacagagtatgcaaaagacaggtcactggctcacaatttgcctttacattttttatggccctcattgtttggcttatgcttatgcttataatccaaaatttgaattttagaacttgattttttggttttttcatcatagtttattttacatcatttgcttttgagtcgctaaggacacatatataaaagttttactcacaaatgattttttatttgttaataagtgattcgaataagcttatgaataagcaaaacaatgctagtttttcgtaccatgaggcttattttggtttttgcttgtttgtttttttcatggaacatataattttattagtgctggcgtcctttatttgcattaggctccatcaagtaggaggcacacaagcttggacaacagttgaacaacacattctgcaagcatcttgagtcttgcctgacaagatccctgcatcctatcaagatgaatagtgctcctgattttgcagctgaaacagcttcagttatgtcaccatcacggtagatcaattatgcaagtctgtcaggcccccaacatcaggccaaccgtgtatgcattcattggcagtatgctgaaaggtactgaatatatttctgtgaaatggtagatttcttgtttaaattcttagctgttattagacgtactagatctggagtgatcagtgatgcaacatctcattgccactgggaagcatgaagacaaggaaatgagtcaccaaaagataattcgctgctacagaaaaagcgaattaaaaggtagttgatctgctgcagtacgtgaatccaactgtgtgaatgttcctatccaagatggctttgattatagcgcatttgctttaacatcctagtggtgtactaaagggggaataaacatttccaaggatatatcatcttgccttgtgtaaagatacttggggcaggcttatatgcatgggtgattggattccatgtctagccatacaggcgccctttaggtatctggaacacctaacattaaccatatcctatttagcgtcaatccagttgctccaatattaaatcatcacctaaagaagtctccatctgagttgagacccttgatctcttatttatttatttactccttgcagggccagtttacaatacgtacattttcagaaagcagctccaaacaggatcttgcattggatttagcttcagcaggatgatatactgcaaaaaaaaaaaggaaaaaagaaaaaagggttaaatacctactcttgtttgagaaggattttaatgacagaaggattgcaatgacaagatcaggatcacactgtaaatggtgaaagaagagcaacagcaacagggcttcacatcatattcttattcaccaaatctctctttggattccagtcacatttgcccacccactaagggtgaccggtaaaaaatgaggtgtcctttctccatcttaaattcggtccgtggtatgaacccaagattttcctccccctctatcctggtttctgcgacaactcagaattggattgttcgtcgtgtaagatttttgatcacgtatttttgttttcgcagtgttgttatcatctgtctagtcaatgaatggtgctgggattacgcagctaatacagcaaggcagccagttggtgtgggtgggtgccacaaataatgcagaatggcagccacaaccaggatgctccaaagtggctggtccctgtcttgttcgccatgaacatgaaatgcattggaggaaagctctgttgatagaaacagcacacaaacacataatggaggatcaaaagcgattgagaggtattattttccttctttgcactaagtcaaaccttgttactttcatgcacatttgccagattttgatttgctgcaggcactcagtgtggtcttgtttgtggaaaaagatatgcgagtacgattaatggattcattttttttaatctcttgttctattccaatatgcatggaaagtacatcgagacagctctgttatcgccttaaaaattaatgcacaaataaacattatctttttttaaaaaaatagtaggaataataatgagaaatgtggtgatatttgtcacgtcaggttggtcataacaaaagttaaaattcggtagaaattcctctcacgtggggccacaggaatcacataaaaacatactgatatatcctatatccatcagcctacaggcagctatgtatagaggtagctgagcaattggcatggccatgcgttagagagagagagagagagagagtgcatgagcatgatgagctctccttctccctctccttaatttagacataaacttaattagctatgccgctcctctctctaatctcccctccaaagattatggttggtaggagatggatgagttcctgatcatcttcttgctctaaaatggaaggtttccaatggattccagcttctgaatcttgcagctagctaggtaggtaggtagctggtagcttagctaggcagtcaggcagatggtgtgttgttgcttctgctgtgatcgctcgcatacgtagataaggttagaggttgatcgctcggtagatggtactgatggccgggatgcttcccggagtggagtgcgcgcggcggcgacgtctccggcagggcggcggggaggcgccgtgcgggacgcggcggccgtcattgtgcctgtacgccggcggccacgaccacgccctccttggctcctccgcttgtaaggtagagatttcgagatcatgaactaatgttacatcttttttaaacacaaatacaggacaatcatagatcagatattgaatttgaaatcgcggtatttggaattggaattatgttgcagcagcagaggagcgcgtgcgaggagcagcagcccgggtggtggacgctggacagcaacgtgcgggaggcgaaggagaggctggaccagaagctgcggagccagagggaatccgccgtcgtcgtcgtcaagaggtgctcctctaatactccctccgtttttaaatgtttgacaccgttaactttttagcacatatttaaccgttcgtcttatttaaaaaattttatgaaatatgtaaaactatatacatacataaaaaagaattaataattacttaatttttttaataaaacaaatggtcaaacatgtttaaaaaaatcaatggcgtcaattatttagaaatagagggagtataatctaatctccttgagtttgactgtttactaataattaattttgcatgcatgcaggcataacaaagcgcaggtggcaggaacgagcagtgacggcggcgagcagtcaacggcaactacggcggcgccgcagtgggaggtgtacacgaggaaagaagggcggcggcggatgtggttcaggaggttggggcggaggccgacgccggaggaggaggaggagtgcgcggtgtgtctagaggagctgcgtgccggggaggcggtggcgcacctcccctgcacgcaccgcttccactggggctgcgccgtgccatgggtccagaccgcctcccgctgccccgtctgtcgcgccgccgtctacctcacctcaccggcgccggcggccagcaacaactacaactagctagacggaagcggatcctccaacgtaaactttctcctgacgcggttactgatatgtggacccgtgaacgatgggatctatatgtcagtcacatgttcctttgacttcctaatcccaactagacagcttattaaacggatcgccagttcgccgctgctaactgtcactggtcactactacccgcatcctttaattttgattgattccatcaacttaattatatatcgtcgtttcctctcgcatctcctggtctctctctaccatgcacatgtcgcctgcctatgctacagtattatgtctcgatcaaactctctgtaatagtgtacttcctccgtttaacaatgtaagttgttatagtatttctcacatttatatatttagattcattaatattaatataaatgtgaaaaatgttagaatgacttacgttatgaaacgaaatgagtacgtcgtacgccgtggtgttacgaaaattagacacgcggaattacgaaagttactatggaacgacgactaattttcttcttaatcgtggtaggcatggatgattaatcaactcatatatactagatgacgatacggaaacgtatacgatattagtatatttgttaacgaagttaaatccaagcttatatgtctccgattataaacacttctccacagtccacgtagcgtcttagccgctacaagcctatggtctcgtaaccattctcttgctacgtgtttaccctatattatcgtcgcgatggttacgtcggatgttgcaaaaatctctaaatttgtccatgttcagatgtgtgtctctctcccttatatgcctaaaaaattaaagataagagaaaaaaaagagtaaattgtattggtgatacacaacttattacatgggtgcaatttagtacataaacttgtaaaatgtttatttcagtacacgaacttgtctagttcatgcgaacgaggaccaaaataacttgacaatgttaattttatgaagtgatgttgattaggatgtggcgtgcatatgtgtagtgagtatgcataggacattcaatatttataaatttggtctctactttattcttcaccatggaaatgatgaatttcatatatttctaacctttataccattgctcgtttttttaatctttttctactatcactatattctattctatttttattgaagagatgtatgtctaatagcaaccttctctatgccctaaatcaataagattagcgatgtagtgtcattttcaccttcctctgcacgcatcagacaagtttatgcacttaaacgagcattttacaagttcgtgcactagatcgcacccacctgacaagttcgtgtgccggtgatataaattactaaaaaaaaaagtactccccctgtctcattataagtgcagccatgattttccacactcaactttgaccgtctgtcttagttaaaaaaattttgaaaaaaattaaaaacataagtcacgagtaaagtactattcatgttttatcatcacattaaaaaatatcaattataattttttttaaataagatgaacgattaaagttagatgcgaaaaattatgattacacttgaaatgggacgaagggagtagtatgcagtaggctcgagtaaaagcagaacaatcgcccagtgttcctctgaatcatcaaggaatctgagagctatggtatcatcgcccagaatgttcctcaaagcttcattgtagatctcaatcgccgaaaatttgtaaaggaatttcttcaccattatcggtactgactgacactaatctgaaaatcaaaatgggaaatagttattcatatccccatcaggggcatacattgtcactataagtgtaagagctatcttggacttgtaccaaagcatgagaaaaacaatttatcccttctttctatatattatactcaagacccaaagctggttgagccacgtcacctgttaaatcacagccattcgatgtaatctggacgctcgcagctgccgccgctagatgcagtcgcttccccaccatccggaggctggagtcatgcccccagcgcagcaggtggaccctccgccccatggctgcatcgcctccctcccccgcccccccccccccccccccacccagctgcagtcgccctgcgacgtcgcaccctcacgcccccagcagccgcctcccagcctcttcgcctcctcggcgttcgatcctcgagtcccatctattcatcttcagttttttgaaacagtacgtcgcttgctttatactggccttctttcccgtcctatttactacgtatgatgatactgatacacacaacagctgaagaaaagtggtatacagcagctggatcaatctgctcggccagcaagtagcttctcctccatacaagcacatccctagattgatctgctctaggttgtccactgcttgccgatctcacatgttccagcatagcttctttccccattcagctaattttttttataatacatattgtttgatgctaattgtgtagtcacactaatttcttcgtgattcaattatcaatttccaaccgatttcagtatcccaaattattcccttcttttttccctgtataactgtatttgcgctaacagtttaattattcccttcaatttcttcacaggattaactactttgatttcgtcttgggtttattactagattaagtaatccacgaccattttacccaggttgttgaactattatggggaaatttcttcgacggtaatacgtaacaatacaatcctttttcccctaactatacaatttctattattatgctcctttgttttccatatttatttgtcatattgtgattattctggttaccttgcatctatcaagcacctttgtattttaaggttttagtattctattatgttacatggaaagtttagtagtacacttgctgcactgaatccctacagataattcctatcactgaacaatgtttagtgaatcaataattcctatcactgaatgacatttagtgattcaaatgacatttagtgattcaatgattttatatgtatcttgcatacttggggtactaaatgataagatgaaatataactgtagataattcccaacttatcaaaagtttggtgatcctttagtcagccctgtaagcatgtttcagtgaagccatggctcagatggagattctttttatcatgtgcaacacgatgattcttcaggctttggcaattctttcagtaaccatcaatgatgtaagtgccagctacagtttgtacaggtcccagtcttctttgatttgtttaccaaatattacctgacctgagttcacaatttaagtcataatagtatgatctcaaaattctcaaattaacttaaaatatgttactgtttattttacctcaaacttacattgattcatataacatgtttatcttcctcatgtactgagaaagcacaaagaataataaaaaaatggaaaccacaccactattctggaatggtatcatgagaactaatgagaccaacaatatctctacattaataaattatgttaattttcttgagttaattaggttgcccctaataaatcgatacctcaagaagcactaattaggttgcactgcttattcttcagatacagataatggtgagtttttgatcaagtttccaaaaagacgcgaatattagggaagaacctaatatttggaatgggtgaggcttcgaacccaggtcgtctagcccaccaccttgtggagctagctagaagatccttggtcgtttctcatcacactgtttcccccaaactacaaaagcaagctgttcaacaacgatgtgcttctaaaaactaaagttgttgaagtggctgacgccacgccggcactgatgctgagaggtgggaaaggggacttgagtgtggctatggatggtgcaggagagatcacaatcggcagcctctcctccctgatcacgtattgtagtcccggcttcctgccaccacgagatcgtcgaagccgcgccgtcaatagtggaatcagccattaatcggtgctaaaagccaagacacctctgaatttatttaatcatcaattaaaatattattacatgtctcccgtaatattgggaagaacgacagaccaaatcaatcactcgtaagttataaacttcaacaaaaggaaacaacttaaaaattgaaaggaataaataggacaatgtaatgcagggttggccattgggtgagaaccattaataatgtcgtcgctcagtcatggatgaaggaatagatggggaggtactacataatcatgcttgtttcattgtttgaatataagcgacgactttatcaaagaatacctcggcctccatagcatcagcttcgcaacttaatagggtaaacccctagtcgtgtgcttgaggattgggtagtcaagcttccgttgttctctgatatagctatatttggctggtcggcccatgtatctattaagtagtttaatctgaattttatttgctttagatgtattttgctatgtatattcatgcttaagatgaaagtgtgaatctagtgcacatcctgggagctagattcatgtgagtatgagttaaagaatatttgagatgttgtagatctttagccattttgtcaagtctcctgaatgtgtaacacatctggtcgccgccttcgagtggtttgatggtcacatctcgggctgaagttgactggcaggctaaaggcccagcaatgtctccaatattcttctctcgaggcgtcggatatttcattatttttgtttgatgacttgaattattcacttcatctctcaaatataatgggaggtccggagagcctacgacacagaaaaaacataaacaacttataaatggtcccggcttcctgccaccacgacatcgtcgaagccgcctcgtcaatagtggaatcagccattaatcagtgctaaaagcccaaacacctctagatttatttaatcatcaattgaaatattattacatatgtctcccgtaatattgggaagaacgacataccaaatcaatcactcggaagttataaacttcaacaaaaggaaacaacttaaaaggtaaaaggaataaacatgacaatgtaatgcagggctggccgttgggtgagaaccattaataatgtcgtcgctcggtcatgatgaaggaacagatggggaggtactacataatataatcatgcttgtttcgttgtttgaatataagcgacgactttatcaaggaatacctcggcctccttagcatcagcttcgcaactttctgcacacttcttgcttgtggcgggatcctccttatatactgcattacactcattgttgcaaaaatctatgaatctatccgcctttagatccttcactcccttatgggcctcaaatatagacttggtcttgatgaagcagaagtcttcacattgtttctcgtcgatgggggctttctttttctgctcactgcattcctctttgcacccagctctcactgcctcctctagcgtctctggctcctttcccatgaccgccacaagggtggcaaggagcagggccaccgcaatggtcttgttctgggccattagcgctgtttttcttgagtgtaattggtgtggaacaaagatgacttcccttgccctgatgtccctattatatagtgcatggatgagagtaaaggagctatataaatatgtggcggagagagcttcatgggccaccaatgatgctaattataggcatgaatattctattgattgctggagaaccattccttccttatgacagggagtgatgcggttctcatggcatccatgcgttcaaataatatcggaaaatagcaatgttgtccgttggtaccattgaccaccttttttacatacttgctctcactgaccagtgggccctatgtgtttaaaatctggaaaaaaaattataaggaaaatgactagagaagatattttacaattgaaaacttgcccaaacttttaaaatacatataaaatccattttatctcatttttagatgaatcaaatttctgtaaactcaccgaattatgcactttaatttagaaacatgaaacttggcacttacagtagaagaaatagctctaataattcatataagaaaacaatgaacatagagcaacctccaacttataaaatttatagaaaattcaccttgactctttttgaagtgaattaagttccagcatgttcaaaaaataatactcacgtttttcatgaactaaaacttaatactctctgtaataaaaatgtcaccaaatgtttatttagtaaaatttactactatagtgcaaactagagactataaaatccataagtaattcattttaactctaaatgggcaaaactaaaatttgttagtttaatagaagcatgtacattagttctgtataaacaagtcttagaagaaaacatatccagaaacatcactaaaatttgaataaagagttaatattaaagaacggtatagaaacttctaaaattcatataaaatagaatataactccaaatgaagtaatatcagatttattaggttggaaaattcatcaacttagttactataaaataaaatatgacacttacagtacccaaaacatatctaaaattcgaaataactaataaagactatagcatatgacctagcttgtaaaattcataataaaatcatgctaactttaaaaattgtgaaaccaaccttgtcgaactcctgtgaacatccccttcactgcagcaagccaacatttcacgaaaatttgaccctaaaatgcatctaaggactattagagcttaattaatctagtgctagtattaaactttgaaaatctataaccttttaatgcaaagtgataaaacataaattcttacacctaaattcatcttagaccagaacctaaccacacaagtaaactcatgcattttagagcattatagatttttacatattttggtattttattcgttacctttatttcttttagacggcaaaatctttatcagtgaggtgattgatcttatagctgatctcagggaggtcttatatcaaccaaggcaagtgttgcccttcctttgaacatatcgaatcctatgttttcgggctaaatgttttgattgtaattttgcacgcgtatttctaactatcggtacttccaaactatagattgtagttatcccgtaaaaagatgcataactccccttttgaaaatcacttccttgttgttttgaaccttaggattaattagagtactttagttgtgctcatatgacaatactatgcttttataaagtgcaaatgcttagccttgcttagtgataaataaaaacatggttatggttcaccaactatactttttgcaaacctttttgaacattatgggcagaggtgattccctgattatttatgaaataaaatgtgattttagacttgggcggcaagtggtatgcatatggtagtagttgcataccgatagggggagtgttcgcctgagtcgattaaggaccgaacatcatatcacccattatgtttaccatacatccacatgtgctagtatgggatggccttagctaattaaactatttagaactatccttgcattctggtaggccggtgtgtatgagttcgaataattcagaggagcttcctatttaccccaatgtggtagtttaggtgactaagcgtgtccaatacaacggtattgtgccacgtggtgggttcccgtagtgtccgccaccacggcgttaagtttaaggcgtgggtccgccacttaacggttctagacatattccaagtatgcctaggatggaggaacacgtatcgtgctggtgcaaggctagactctaagtaggttaaaggcttcgttgtgatctctagaccgtactcaatgtgtagagtatggtggtaccgacaggtaccgaacaaactagagcgattcacatcatgtgggtaaagctatacaaactctgcagagtcctaaaaactaatcgattagctgtgctcatgatcatgagcgacatgatgatgtgctatgggtataatcttgtgatttctaaatgcttttgaaactgaatgttttgagatgatgatgagattggtatgtgtgatatgattgccttacttcccgttgagttgtaagggaatgatgtctatctatttgtgttgatatcatgccataattaatatgctttcacattgcttaaattacgttgcaaatggtttgtgaactaaaattggccttatgctgaaaattgggactacaaatagccttcctttgacttagagctttcatgtatgtaggtttgatagtgctcttgccagtacattaatttgattaatgtactgactcttgccatttgttgtctaatttatgttttgcgggaatagacttagtttattttgagtgatgcgggtttcgactgcttcttctaggatttgaacttaatggggtaaacccctagtcggtgtgcttgaggattgggtagtcaagcttccgttgttctctgatatagctatatttggctggtcggcccatgtatctattaagtagtttaatctgaattttatttgctttagatgtattttgctatgtatattcatgcttaagatgaaagtgtgaatctagtgcacatcctgggaactagattcacgtgagtatgagttaaagaatatttgagatgttgtagatctttagccattttgtcaagtctcctgaatgtgtaacacatctggtcgccgccttcgagtggtttgatgggcacatctcgggctaaagttgactggcgggctaaaggtccagcaatgtctccaatattcttctctcgaggcgtcggatatttcattatttttgtttgatgacttgaattattcacttcatctctcaaatataatgggaggtccggagagcctacgacacagaaaaaacataaacgacttataaatggtcccggcttcctgccaccacgacatcgtcgaagccgcctcgtcaatagtggaatcagccattaatcagtgctaaaagcccaaacacctctggatttatttaatcatcaattgaaatattattacatatgtctcccgtaatattgggaagaacgacataccaaatcaatcactcggaagttataaacttcaacaaaaggaaacaacttaaaaggtaaaaggaataaacatgacaatgtaatgcagggctggccgttgggtgagaaccattaataatgtcgtcgctcggtcatgatgaaggaacagatggggaggtactacataatataatcatgcttgtttcgttgtttgaatataagcgacgactttatcaaggaatacctcggcctccttagcatcagcttcgcaactttctgcacacttcttgcttgtggcgggatcctccttatatactgcattacactcattgttgcaaaaatctatgaatctatccgcctttagatccttcactcccttatgggcctcaaatatagacttggtcttgatgaagcagaagtcttcacattgtttctcgtcgatgggggctttctttttctgctcactgcattcctctttgcacccagctctcactgcctcctctagcgtctctggctcctttcccatgaccgccacaagggtggcaaggagcagggccaccgcaatggtcttgttctgggccattagcgctgtttttcttgagtgtaattggtgtggaacaaagatgacttcccttgccctgatgtccctattatatagtgcatggatgagagtaaaggagctatataaatatgtggcggagagagcttcgtgggccaccaatggtgctaattataggcataatttttgacgtaagaaggtagagcaggttctacattataaccatttcattaatataaatgaggggttacatgatttttatcttaacaaaagaaaagaaagaaagaaagagaggaaagagggggtgggggcggagttctgtacaacaaaggaatttacaatttaattggttgctactagcctttcacaccaggacaagagcttagccctggttgtttcttggcctcgatgactccagagttcaatggatttcctgacttgacttgacacgagagagagagaattttgctacccatcaaagatcctggcgttgcgtgctttccatagggtctgtgggcaggccgcgaaccagattggttcaatgcctcgtagtgccatgttgttcttgattatatcctctaggaatgctgtaattgtttctgctctgttagagaagtgtagaattcctagcctttcccacatgcaagaggttgcttggcatcttaagatgatgtggcttggcggtctccaaggctgggcagaggtcgcattgtgggttgtttttttttttttttagaaacacagtacaaacgcagacgcttacaacgtgcgcacactcacccctatgaacgcacacacgcacaccctacccctatgagcacctcccaaagactgagccggtatgtcttaagattgatgaagtctgtgggttgttgtttgccctggtgtttaatctgtctctgaatgccaaccaaagaaatagacgacagttttgagggatagctgagatccagatgaattcagccggtttccaaagtagcccatgattcgtcaaaatgtggtatgcatttgctgttgagatttttggcgctgggtgcaggaactgccttgtgtcgacagcatccggattgggttggagttgtagttctgtagttgcttgagaagacaagttggggtgcaattgtagatcccaagtattgtgctggaattgcgaggctactgtgcagtccttttccagggcaaaggagaagagggttgggtaagtttgttctaatctttcctgtgcccaattgtctttccaaaagaggcccaaggaaaccttgattgtctgaatgaggagctcaattttggatagaattagcttccaggttggcgtgtcattggttctaggaagcaactgtaaggaattgtgtatgtacttatgtctggaccaattggagagcgggtcggctgagcttgttaagatcttattaccgagcttcatgatcatcgcagtgttgtgcgcccttaggtccttgatccctagacctccgatctgcttttggaggagtattgtcttccatgcaaccaagcagtgccccccccccccacccccaaagggggcacccaaagatactgagttcaaatcttcatatgagcgaattttagattgggttatttgagagctaagtttcttttttaaaaatggctgcatatatccggttggatatagaggccgggtaaaaaatacccttctctaaactttttttttaaaaaaaagcagtggccccccttgacagttttctctcctttccaaaggaaagcccttcttattctgtcaaccgcttctatggatttctctggccactgacagcaggtcatataatatgtggggattgccaagattactgaattaatcattgttaaccttcccgctgtagacagtggcagccacccggccagacatttgtcaatttttgagataaccggcaacaacatattgtgggaaatcttggttgtggaaagaggtaggccaaggtagttgcacggcaggcagcttgcagggtattgtaggatctgggttaccaattcttctgctgctgcattcaggtgtattggtactagggtgctcttgtggaagttgattttgagctccgagaattcagcgaatgaatctaaaatttccttgagtgccgaggcttggctagcttctctgatcaggattagtgtatcatcggcgtactgcagtgttggtggtgctccttctatgtctagaggatgtgatagcaccccggtattgtatgcttgctggatcaacttttgtagtacatctgctattagaatgaatagatatggtgataaaagggtcaccttgtcggacccctctcttatatattggattgattatcctttttcaccgttgatgattacctgggccttccctgtgcaaaggagacatttcatccatcttatccataattcaggaaatcctcttgcttccaatgttttgaacagggcatcccagcttactgtgtcgaacgccttgtggaaattgagcttcagcactatcattggctcctttctcttgagcgcagattgaaccatctttgatgctagaatgaaattttctgagattgacctgtttttgataaaacttgattgcatagggtcaatgagatagtcgatgatgagctgcaatctgttggtcagggccttgcttattagctttggtacgctgtgcagcagagaaattggtctaaaatctttgatttgagctggtgctgatgttttcgggagaagagttatgaaagactgatttactccagagaggtcggaattgtagcataataaaactaaacagaatatctgtccgaattcactttattaagatggctctaatcctatcctaagttacaatattttaggacggagggagtatccaataacacgaggaacctcttgacctcaacgcaagaagcttagctcctcaatttttcttagctccaaccaatgcaattaataaagtgtatattttgtcaatgctactgtctttcttctaaaataattttacttttcacccatcccacatagatatatataaaaggaccagaatacactcactttgtgaaatctcaatgcaattattttctactttatatactcctaatacatttatcttctattttcacaaactcggatgaaatgattgttcaaaaataaatttattttgggaaaaacagggagggcatcttaatctaggacggaggacggagtgagtagaaacaagggaaataggccatgatcatttggtttatccatgctgcctcctactgattcccttgtaattttcttcgtgcaagaggcggaagtgcatctctagcgctgctgctggtgcggccgcatattcatcgggaggcatgggagctggatcattcagtgagcctcatctttggtccctgcacagctgcaccagagcacgacagaaaggggtatggtatgcattggactgcgctgaatggagaaatttcttcaggtagcagaggattaactggggatctacatatatgtacaagctggctgaaatacagaggagcgaggcaggctcactcgacgactacaaaaggtatatacatgtctcggtatagtatcgttcaggtcgttaaattaaatgcaaggaatcgaccgcgtggagcaggcagaaacagaatcgtatggctctcttcttcggcttcggcaagggcaaggcaatcggcgattgcctggatgaacacagctgcttcgcgcgtgccgtgggcccgtggagcagagacgaagacaatgcttgctgttgaaaggtcttcaggcggcaccttcgcacacgtccccacggcacaacgggcagaccctgaaacaattattcagtgattattaagcagctctgcctgggatatatagtagtagcataaccaagcaaaaaatgaatttgcttttcccttttttttagtatttttttaagaaaaacacatatttttgttcaagttgcacaaaacaataggagtttctacgtgttacacttaaccacagttattatggtcatattgtttcacaaaactatactgctatatacatatatttattttttttcttcggatttcctaaatttatggcgtcacattttgttgctcatcacagtcgaatatttttggccactagatgttcagtgagattcgtgtttgtgcacgtacacctcatctgatcaatatgtacggtcattagctgtgggaccacctacttaatttagttaatataatgaattaatttacgtctcatagacttgtagtatgtttatgtttatattcattgatttaaaatgaaattacatcctacttacactctacttacatatgtaattttggaacttacgtgtgcaattttagaacttacaccgtaaatacactaaaattacatatgtaatttaagaacttaccatgtaaatacatgctgactattttttggtgaaaaatatgatgccataaatatagctactccctttttctttcatgtactaacatataaattctaaatttatattcaaaattcatgagttcatttaatccatcgtctaagttaattgttttttactgtgataaaatattaagtttagttaacagtctggttttgtgaatgattaataccataataccactactgtggttttgagcaactggaaccataatactcgggattgtatgaaatactctctttttttaagctaggatggcatgtttgctacccacctgtgtacttctttgagccacttgtcaacacacagcaagtgaaactcgtgtttgcacgggaggcttcttatctgatctccatcctcatattcagttaagcagatgtgacacctgaaaaacatttcagcaatggaagtttcagaatcttaaataaggaaaagaggccaaagaaaataactactacttggcagaattcccttcccaaggtagacctacagttataccaaaatataactccgcatttgtagctctaagatgatcctagggcatagaatacagaaccactgcttgattggttaaaatgaaatacaagaatcacatttttcaatttctgggtgctaagcagaaccgatatattggactgaaatgaagatggaaggcaacgaacatcttgtcaagcatggaagtaaaactagaaatggatcaaccacaaaattgacggtcactgaaccatttaaactgccaatattttttcctcggccaggtaggtgagttgtttatatcatttcattaagcaagagaacagagtacaagggggagggcagaagaaacccaccaccccttaaaaagacccataaattaaattataaacgaacatcaacagagaaaaaaacgaccacctaaaccattaagggttagcgacctactaagtaactcagagcctcaaagctcctgctgagcaacacaaggcaccctcaacttctaatagtttatcaccaatgttgttaacttgtccgcatattcaggtgccatcatgatatgcagtccaaaaaatagtgtcaagtttcagtaagaataacaaataacttgttatatagtaatagaatctcactgtgattttcaacttttaggatagctcgctatgatagatataatatcgtgaaggcagaattagcccccaaatgagtcatggtccaaaacgctaaacaccttggcccttggcccaatgcccatgacaaaatgcttatttgataagatctctaaaattactacaacaaccatattaaaaggctgatgtaaggcaaataaaataatagggattttgtcagggtctcaatttattttctgatggataatggacatgaacagcatagttatttcaaacgcgtaagatactgtgatgcatttgtagcggcgaacttgactttcttcaatgacactcagaactatttttggccctaggtgacaataggtaaatgataaaatttgaatggtaagaatctcactgttccatgtcatcactgcattgggctgtctgctttttgtagctcttacatggtaatgaattaaccacagattctggagcctgggcagagaccatggaaagcgaaagtgatgcaggttgccggtgaatttcatccaatacctgtgaagaattacaaagtcaaataataaataggtagacagaaggatatgtaaatgcaacaacaagcagtaaagttgatctctccctagtaagcctttcctagtttaactaatttccccatatgttccataacaagcctggaaatccagagtttgattcttgcttttctcgctcagtcttggcttcacaatatagccatgaaacactgccttcaaaatattgttgtcctgatactacatctatgacaaactgtattgtgttgttgccaggtgatacaaatttaaacatgttgatatgaccaatgtattcaacatcaaatttaaatcatgaacatacttggagttcatgcagcctaacttaatgctttcaaatttgagtataagtgactacagcattgctaggttgaacttgaaggatggaactggaggtcaatcatccgcaaaagtataatggcagctaagggacttcgtcacatagatagtttcagttgtatcactatcttattaagtgtgcatagttcgaatgctgggaattattatttaacgaataagacctgaatatacagaacaaaaaaaacttctcaatacttcaatgatttgggctggccaagcctatacacacacaaaaaaaaagaaagaaacataaaaaagaacacacacgcaaacaataggtaagccatgcagaagaaacagtatcatcagaatactgatacaaaaggagctacattttagaaagatagggaacgaacaaacctcaaataatgcctcggttaacatgacaattcttgatatacttgcacgggcactagattcttcagcaatcaagaaggaatcacaggtgcatctgccaatttggtggatccccaaaggacaagcaacggtactttggtcagtaccgctatcaaaaacagcacgccgatgctccctaatctgtaacagaaaacattaccaagttaatgatatgtttgcatgagagatcaagcggcagataatgctgacactagaccgtaacagcaatttcagcacatcaatgaaccaggagtaagaccacatcggacagtgtgaaattgcatgagacgggatatgcagacagagaaaaagtattttacttcacataattataaatatactgatcagataagagaggaagttattattgttgcagatttgtgtactactaatattatattaggtgacaattcaaaccagtgtaaccctacgtttacatttcatgaccaccttttggttatgatagcaccaacaacattattccaaatgtgtaattgtggcacaaacacaataggcatgacaattacccgagatcttgaatactggcttactctgattgaaccatggcgtctccgatgaaagaaccgtgcctcctcaatctcatccgcaaaaagttcatcaccaaggtctagccatctgctgtaaaatcccagatcatcggtatcagaatctaaatatcctcttgaactacgtctggaaaatgtgtcccacagaacccttctatggctcctcctcatttcattgctgcttgaatctctaacacgcgctggaccatcgtttgagaaaatgctcatcatgtcatcatgtaatgtatttccaccaatctcaccttgtgtcccactaaatatggggacatcttctctgctagggactgtatctggaagtgattctccaattgtagatggtgcagttgaagtagcaggcaacacagatgttaagctagattgagaagtatctgatctttcacttgacataatagttgtggatgaagtcccatgagcaatctctccagcctccaagtcagccatgatcctttcagatgccctctgtgaggaggagaaaccagattcagaaacggggccaccaacttctggaatgcaaactgtgtcagtctcagcattgtttgctgcaggttctaaaatatctcgtccaatatgactgattccttctctagacgttatctcagcataagcaacttcattactgaaatttcccctaggcatgacttcctttcctgatgaactctgacgaacacttgtttcagcgatttctgttcccagggcatcttccttgttttcgtgactgtttaagtgattgaacctgagatgatgacttattgtgcttgaagatggatgcactcttggatctgactcacttgatatgcggatatccttagcagcgacagaagcccgaaagtccatctcagcaaccgctcgagctgcttgccaagattccacctgtaggtagtacctttttggaatcagaaaacaaccagcaaacaaaagaaggacaagaatgcaactatctaattgactgaaattatgaatccactggcaattaagcatagagagtgttcaacgtttgtaaaattagtaaagttttttttttcaacttgccactcagaagcagcccttttaagtgcagaacgataaattcagtgagtgacccgttgaacctccattcatttgcatttgctgcaaaattgcaaagcattcactaggcaagtagactatcaagttcagactcaaatattcatgtttgcatgccccatatatgcaaagcaaggaccacaattattttcagtcaaacccatacctatcatcattgaacaagcaaagcagttcaaaaaaaatgggaactaaaacctctaaaagcttatctactttccgattcacagtcaccgtgatttttccaaaccaaaatatatgccatgaaatcaccaccacccccgaatcccacaccctataggttccggaaccacaaatccatccactcccccccccccccccctccgcagaggctaatccacgcgtgcccgaacggcgacaccctccggtatcccaactcagccgatacctcgtgagctcgcgaggaggacgcggcggtcgcgccgccgccgccgccgcctccggtggccgccccagaggatccgccgccgaagcaccccgcgagcccgagcccgaggccgcgcgccgccgcccgccgccgcggcggcgcatcggcgcggctgctcccggcgcccatctggctcgcgcttttctgggtttttttttctctctctccctttttttttcctttctcctcttgtcggagaacgagagagagaagaagaagtagcgaggaactagctcggaaagtgccgtggatgtggggtttgtgtcgctttatatttttgcacgccttcataaattcgcttttaattgctgtaaattccagcctgctactactactagttgtggattagatgattaattgcattttttggatgagaagattttgatggttttaattatcatctcaaatcattgactttttgtagtacttaggttagttgagtcaataacaaatgatcgagttatggcaaaaatgtgacacaaccgtagttagatatcgtgtactcaacctgttttttttttcttttttttctctcttttgacccaggttaggaatgctaactgtaatgtttttttttctaacagaggcatgaagagtttggtccctttttggcaccataaaaatgttactgatatttgtgggaatggaacaggttttcctacaaaattcatgtgtccaagagaaatcgtaaaagttaggccatgagaaaggatttttttttactggaatttgtctgaaaatatgggcctttgcaaccgtagcatgtacgcccatgcagcctccacccaataacaggtgcatagcacatcatttttatgcgtgcaagcaacatgtatgtatcatggagcatcaaaacgtagctttgattatttttgtagcacatataggctggcatcaaaatttatccgaatttttcagtacaatggagattgctacctgcctcttcccctatccaaactccaaagcattggaaacaagttagcaggatgacatctgattttgaagaaacttccacatattcctatcaagatgcatctgtttaatctgaaaatttctgtaaaacttcagactttgaacacatgcctgcaaaagtgcaaagagttttcagctctgccctttgccaaggattccattggtcggcgggctctgtcagtactgtgaaaaagcccggcatcattttgttcatgactcctttctgcatctcacgcacgaatcttggcgacatcccatggcccagctggttttgcccctacacacacaacactaacaacagtacttaatcactcatcatttggtgcaacaacgccagagcatgcacaccttctcttttggcacggcttggctgcttctcatgatataaagttctataatgaattactccatttgatttctttagttcaggcaggaagtactactgaactaggatgattcagagtttcagacaaacaacagaataacagaaaaggtatacctcaagacacatacaacctggcattggatattatagcactgaaacattgagcctattgtagttttgtagttgttaattaggtaattggtgatcagttgcttgcatgagaacagtatttatgttctgctctgcatattcagtgatgacaaaaaaaaaggttaatggaatattcagtgatgacaatgattatgccctcctgacaatggaacattcagtgtgccagtttcatgcaaatgggttcttaataaagccacagttcttgctttatgcaattaaccctcaaaaactcagaaaaatgaggctttcaggtcgttttcagagatgagcagaaacagggcatccaaaaacacataaataaggtatcaaccataaaagatacatcgcaactaactgaaaactattccctccctttattttttgtctagaaagtatgtaccaagtaccaaaacatacctatggaacacttttaatatgtccaaaacgtccagtttgccagaattttcttagtgaaaagacagcgacaacggcggaacagctctgaagaaattaaaattgacggataaccaacctggtctcattggttacttaataacgaaaattatattaaaaatgtttcaaggtttttgggtatacatgaaccggtacgcttgatccatcaacgtgttggaactattttcatgccgaatgtccggtagcgttcatcaaattcagacagccagacatgaactcatcagtccggctttcgaacagtgcgtaatgttctatgcaggcgaaaattccggcaaagttttatgttgaagtgggaacaaactgctggaacaaataattgtccagtaccacaagatttctttgtatctcctgccaaaaaggatttctttttcatgttaaattagcgttgattaacttgatttgtacataaattagcacgggaattccagtgatagagaagaagaatgaagcacatcttgcgtcccgtgaatcaaggagcaaaataatgattcgttctgcccctgaatttttcatggttttttttcttagtacctaatgcagggtaggtacatactatactttgtataatgttaatttttctacgttatgcaacgttgcgtgcggggtaactagcaagcaacggctgcctaatcttttcttagcttggcttgggcttggcttaccggttcagcaaattcacttcagaatggcatgtggcgactcgtgccagctccttccttcctgatgctgacggatcactggaaattaaagcgatcgctgcagcttgtaataaagcaaataagagaagagtatactagtaactgatagtttacacattattaaagtggaagattagtgatgattaattaatactaagcagacaaaatcagtcctgaaagtcagcattgttgatttgttagtactgctatataatagtactactgtagtgttatatatggtcttgtaatcttcgattatatatggcacaaattaatcagatccttttgttaccggcgacggcgagcaagaggatgaattcgctggcgcgtcggcgaggacagcgccgcagcggcagcatgacggcggcagctgctgttctctcacagaggacgcgcgtacagcgcccgttggttgggcccgaacgggaatccaagtacgtgcggcccatgttagtacctaagtacatgcggcttatattagttgggccggaacggggatgaagtggttggaacttggatgtcaaacgggtccgcgccgttcctgcctcgctgccgcctgccgtctccccgggcccatctttgccgccgcggaactccgccgggctatcgccgtgcttccccactacggccgccgtcaccgccctcctcctctcccgcctcaccccattgacgcccacgcacgcccacacctccccatcaacgctcgcgctgttcccgcctcgctgccacctgtcacctcctgttaacgaccaaaattggtagcatcgacacctccctgggcccatctttggctgccgcggaactccgccgggctaccgtcgtgcttccccactgcagccgccgccgccgccgccgtggcgccgccctcctcctctcccgcctcaccctactgactagcctacagacacaaagagagagaggaggaatcgaggaagagaagaggtagagagagatggctaagccaccatgtatgataaaaccggggtcaaaaccaccgaatgatctattgtgaccggttttgactagttaagggatgccggatatctggttttgcggttgggggatgattttgtaacttgatgacaagttgagggaccttcggtgtactttttccgaaagtatttaggccgaaagagtgtgtacgtgaggcccattttagtagctgggccggaagtcaacgagtcaaatactgcacaatgacaagaataccctcgccaaaccaccacctcctcctccacctccacgccgcctttcattcgaactcttgggaggtttccattcaagaccagtgctcgctgcgagtcccgacgcggcggcggcggcggagccgctctcctcacccgctcgcaatcgctgctccgttcgccgcctcacatccatggtgctcacctgcgcctcctcctccaaaccctaaccctcccgtttcctcgccttctcacctcgcctctgcattcaatccctgcaggattccaccccggctcctgccgccgccgccgcggagacgccgaccaccgccccggcgttcgaggaatgcctccgcctcctccgcggggagcgcgacgagcagaagctggcgggcctcctcgtcgccgccaacctctgccgcgccggcgacgccgcctccgtcgtcgaggtgtaccgcgccgtcgggccccggttcctccgccgcctcctcaacaccggtagaattgccgcgcctcgtgggagcgcttgtctccagtgtaggcatggttcctcttcgtcactgggtttttgttcgcgttgttggatgcagggctggggaaagtggagggcggcaaggaggaggacagggaggcgtacctgcgtctctcggtgacggtgctttccgggcttgctcgattcccagaggttgccgccgacgagggggtcgtctccactgtgcccctcatcgccgagatcgtctccaaatcgtaagtaaattcgctatctaccacgttctgattgatactcaggctaggtaaaaccagtgtagttgaagcagcagacgttgcaacattttgcaattgtgcaagtgaacaatgctacctaactgagtatgcttgcttgagtagtcctccgattctgtatttcagttgggatgcttgctctgcataactcatttgcttatgactctacccaactcgtgtgcaggtctgatctggcaattactgaagaatgttttgagctcctgtctcttattgcaatagcttcagatggtggggcgcatacgttttgtgaacctggagtgatggatatgctcttcctccaaatctcaaacttcccagatggtattagttttaacttgccagtttcctttgagaaatgggaatagattcaagttccagcactcacatttcaaatgcgcacttggatggctgctgggtacttttaccttttaagaattattattgaatatgtaacctagttcacatttggtactcacaccgtggttacatgagttagtccatggacaggcaaaaaactatcttttagtcctgaagttaattggtgtgtgcttttaggtagtagtagttttgaatgatattgtattttactgagttgaattgaattttatacagttatttgattgtatctgttcataggttcaaggtgcttagagcttgccattcatctaatgcagctacttgttcataaaatcagaatagacaacatgaccgtggagaaactgcaaggcatgacaagcatggtatgaattacatactggaatcttttgcgtgaatcttcctatgcttcacatgtttagcagtcctaacgtgatggcttggcctgcaatttcatttcaattcaggtgacctcacttgctaggctttttgctgttcttcatactacagttaaatttgaagcgctgcatatgcttaccgcccttctatcccaaaaggaatctgtaagaattacctcctccctttctgtttcatctaaagtgtgggattgtgttcccttctgaatgatgtttaatgattcctttctagtggcttttgtttaactccttcctttatttttgttgtccaacaagccgcttcatgacgctttgagatcagtaccttccatgatttggaaatgtcaaattcgagttgggataacggccgttctccaaaaccgtgttggtatgtctgcttcatgtttttaacaatatttgtttcctgtgtactgtgaagttgtaattcgttggtctacactatcaatttaagaatctgctgcattcagcaaggctgaaagtgcttaatgtgccactttacactagctattctgtccctatttgcagtactagtctataacttcagataattttaggcctttctcttttcttaaaattgtttctttagtttcagttgctacctttattataggagagtatcatttcgtttcttgtatttagctcgatatttttctaaacttgcaagaaagtttatgtagatttctttgagcaacagtactgtagtatatggtaattcgatggagttattgatcatactctgaaaggattcctttcagaggatataagaacggcactttaccagtgttagtatttactttcccttttgatatggttcatgacactgatttatttgcactgatcagtatcttctgaaaagttgcaagctcttcttttggcggagtgcatgatgtctatacttggtgagaattggctgtcagaagaatacaaagtccctgatgaccagaatatgatgcctgttgataagtgagtttgacattatcacctgtatcctgtttgatatacattcttatacgcataacaatttgtgatttgtgcagatttgtattgcttgtcctagaatctgcaagaatcgaagtttctgtccttctaaatgagcttgcttatttgaagtatgaatcttcaaaaaattcccagagagatgatgccatcagtcagaaagagagaaacctggctatattattttcactaatagaaagaataataaaaatgatatcaaatgccagtagtggggaaggtatgtctaccttattattgactcttttttgtttgcaaatatctagatcgtaggtgatgtattgtagttagtgatgcagtcttctgatcctaccctctatttatgcacccttaatttcttaaacgagtattctgtgtttctatgccttaacttagtgagcatgctgatatgcatgtgttgccacatgttaatggccaaatactgttggatccaggcatgattaagttagatagcttgaacaacttcaatagcaacgtggttgtatgttccttaattccttctttttattaaattccagtgttttgttctgttgtaatgtttctcctgaactgtactgacattgacagttttggatggtaacatctgaactttgaatatttaggctcaaccaacactgctgttgtaatatgttgacatttcttattctctaatttctacctttctgtccatttcgcctatcctacagtttaagccatgactaatagcagagctcctaatcctatatacttacatagttcatcctcactaagtgtagttaatgctatttctttcttctgtcattaagccacatcaccccaattatttctagcctttggatgatatagatctatggtgcaaattgtctcttctttcttctctcataacaccaggcaatctcaattatttttaggctcaaaattcataagtatcaatttgttttagtttaataatcatattgcatcttatttgtacatattatgcaacttaatttcccgcagcaatgcggtgtggtattcatctagtaattataacaaatattttaaataaaacaaattggcactgcatgcaggtgctgtatgtcagaccatccgtgagagcaccatcatgaaagcaattacaggattaaatgagacagttggcttagttttagactttctgcaggacgcaaaggtacatatatgatcagccagttatgaacttatgatagtatcgtaagatctcttacatgatgaagcattgcaggatcatgggcaaaggaaaggcgatgatcttttggcggctgtgagaatagtaggaaggtgcgcttctttgcttattagtaattgttagactgaccatgtggatccatctctgcattctattttcttaaatcttaagaattgctccttagtgttagagatatatggtacttcctccgtttcacaatgtaagtcattttagcatttcccacattcatattagtgttaatgaatctagatagatatatatgtctagattcattaacattaatatgaatgtggagaatgctagaatgacttacattgtgaaacggagggagtagttaataggaatattaggataggatttatttgtttagagtccgtccttatctctatccatgtaactctatatctaccggcccttgaggctcaatacaattgaccacatacgtgtcaacatatatataccggcccttgaggctcaatacaattggccacatactatagcagtactgttgcactgaattaagagtcttataaaaggacatgtacacctcctaagttcgcaagcttttcagcaacacaaaatcagagttttagcttgactagtgtgtgtagttcagaagtgatcctaccaacaatacgcagtacacctctcttcctatgctattcaacactgagataacaattgaacatggttagtattataatggcccttagcttccacttttgatgattttacttactttacatgacagttaattgaattttgacaccgtgaaacaaattcattcgcaatttggccactccatatgcttttatgcacatcttgtacatatgctgttaaccccaaatggatctttaatagtgaaatttcaagaacaaactcctgtagaatattcgttttccttaatttgaaaatatctattgcagttatctggcagaggcaccatatgcctgcaaggagaagattagacatctgctggaatttatcttctctgttgaagggcaagatgaatcaaggtagcttgtcctctattttgtgctcatgtgtagagatctttccgtaatgtgacaatgttgatataaagttctattcttgtgtacagctcattccattctatttgttttatgcttcccatgctatcacaaataacaatggaggctgatggatgtagaattttggcatcatttggaggctataaaatggtaagtaagcttattttgcattacacttcagaaaggttctaaatgtagaattccatggcataaatactttagctgcctgtaggttccaatcagttttgacataggtttacttttgaaatgaatccatggtattgcttaatcttgtcaactactagaagagattttgcggtagtatacaagcctatttttccccttagttatggactgatcttgctatgatgttttacaggttatagactgccttattaaaatgatcgaacagaatggaatgatgattgacactggtaacatgtttttagcatgtgataccatcataaactttttgtcaaatgtaagtggttctgttcttgaaacagactagtttgattatcatgagaaacattaatggttttctggtacttctgtagatgaaaaatgctcatattcaaatggggtcttgttttgtcggccttctaaaagcacttgtttcatggactggtatgttctgctccttatttatatgaaccaattgacctagatatcagcatcatatatgcagtgttctctctagaatcctagttgcttgttggaaaataataatgactgcatgttccccatgcttagatatggaattattgtttttctataccacttgtatagtatgatatctctggaaccaacaaacagattacatgctaattgatgcatgtcatgctctgatcaatagctaccgcttttgttattgatcataggaaccgccgatgattcatcagttatcataacagcctcctgcttatgcacgttggtgttggacttaacaacagaagagtttttattgagcagctctgattttgattccaagacacttgagaagttgtcaaagctcattgccagaagtttgcatcaggtaactaatgagaacatcctttttatggaattattttctctatgatgcaacctcttgccagtcctgacgatggttttttatattctgctgcagggcattcctgacgacgacatagaacaatccaaccaaaagcaaatcatactatcaggcaaatactatactctttttaacataaactggaaaaaagaaaagaagagctctcatttgatttgctatcggtgtgaacttagatattagtattatctaacttcattatttgccgtactggtttgcaggttacaggaggtggtctgatagatatccacgtgttaaaaacatcctgcagcagcatgtttctgtgtgattttctgcttatgattgccgtcaatctcttgtcaaaagagaacccacccccccagatacaaaccttaagttaaagtatacccgtgcctgatattcttcaatcttaaggtgggtcctttcgattcacaaactagccattctcgcacattatttgcatgtgagatgctgctgatgtgcccttatttgtttaggggtttgccaaatgccaatgcattctttgtgggtgcaagcaattataggttacggtagttcctccatgtaacagctagatagtactacacctaaacggatgagcaagatgccattgtatacagtgtcgcgttgcttggcagtgcaccatattggaaggagtagatgcgaagggaaaatgtacatattcaccttttgtctgttgtatcgacgagtattttttgtaatggaaggctttaatgtagtgcaaataactcgcttgaatttgtttcgcttgtgcgcacttaatatgcaactaatagttgatgagtatttgtgcattttcgaaagattaagacggtgtgaagtgttctgaactgtttatgcagcaaagcaataaactgcgtgtgttgcctttttgagtcgtgcagagatggagacagctccctgatactttgcggaaggaggcattttgcagattattacagcgagccttgtgaaagcagcgtttgtattttgcctaaacacaatccctaatcttgtattttgcagattattaagcttttgtgtgtgtgtttcttgagttgtttttgtcttgtcttttgacttttgctatccatgactacgagtataatataatacaaagacgtgtggcatgtctcagccaatccaaaccaaaggcaccttcgtgtatatgcaaactcgactatggccaaccataattggaggccaacctttaaataatcttacttgcttattgcacagcatacacgtagagtttcacacattcaggctcagaatgcaccagttaattagattcccagcaaatttcagaacgcccgtatacgcattgcgagtggtttctgctcagaaaaaaaaaaagaacagcaaagaaaaatctataagcataaggattaaggcaaatactccctccatcccaaaatataagtctaaaacttcccaaaatataagtctagaactggggaagaaacccgtatactctgaattctgaaaaccatatgttctgaagatccctagcacccaacaaattgagttcacgtatcaaaaggttgtctatacagaaggtcctgcaatagtaggccagcaactaattgttgtgaagttcaattattttttcatgataccaataacccaaaatccaaaggcaccttaattaagcacgcataatgacagcagaaatgtggatagagaggatttgtgcatttctttttcatgaaagagtatgcaggagatttgcccgctatatatatattaactaagcaggatggatttgtgtatccgggaaatagcagtagatgtaacatttaatcagaagctatctaaaaactaaaggtgaaaaaaaaaacatacatggatatcatatcctgcagcagtaaaaatagtatagatggaacgtcagtcagctggtctctacaaaaattaagcacacacaagggcagcaccacagcggtataaacaatatggatcattgtaagtatgggaatgttgtaccgaagagaaaaatgcaaacaccatccaatcaaatagcgggcaaaaaaggtgaaacgtaagtgaagaatgcaggtctccaaatacctgcccatgttggttatttgtgacagtgagaccttgagtactgaatcattaccattagctggaacaatgttgccgctagctggatccagtcacaattggataaactgcaatatttggacagtttaagaaaccatgtcatctgtgtcagcgaatattttagccttgttagaactttaagtcaatagaataaaactaactaaaaaatattgtgcccagttttttgttctatttttattgctacaacataaagttctataaatggcttcaagagtgcacaatagatataaataaacccatataaactaatgaaagagcaaagaatggtgaaccacatgtcaccacaatagaagatttgcgcctgaaactattgtggagaatgataattgctcgtcaagtgatgaggtggtaattgatcatcaaactttgtccttatactggccagctacctatccttacaagtgacagagttgcaggtctcagcaaaaacattttcttttttcctgagaagggatgcaacgataatctgaacaagacttgccatatgaagtatctaaattggccatagtgaaatgatagatagacctgtcttcagaattacttccaaaatattatagttataattcgaaaagtcagaatcacaagtttcatgcaaatacattttatgactttttgggggtctcgacaagcaatgtaaagataatctgaagaggttttacctatagaaagtagtcagaaattaacatcaggtaacatatagcaagaaacattgacagccaaacatcactttgaagaccttgtcatcttcattcctttcagactctcatgtttttcagactcagctgagtagtaaactgatctggcagccccctgcacagctttcagagagatccgatggcaacctataatggtcagggattccaagttctgtgcatgcaccagctcagacactccattgtcagtcacacaaacacacttccggagtgttagattccgcaagttcggggtgcgcgcgatggaacgcatgcctaaatcccctataaacatgcaatccacaagctcgagtgtctccagggatcttgaggatgacaggcccttcattccctcgtcgtcaaaattgctggcaccattaagcatgagaacacgaattggacaggactgaacgaggtttacaataccctcctgtgaaaagcctacttctgacggatagtcctcggaacaaaatgtaaaggtgagctcaagaacctgaagcatagggcagtagagagccagggccttaaggctgtcattggtcaatgctgtccgaaaataaatagcatgacacaacagaggaatgagccttaacgagaggcttctgaggttgccgcagttctggaatagtgcaatcacatcgttgtcagttagaccaatgacatactccagccaaagtttctccaatgctctgcatttccccaagagaaaacggagtcctatctctggcttagttacaatatgcgccaacctcagttccttcatattttcacagcagatatcgtacctgtatgggtagtgagcaacataggcaggatcacgggctgccgatgaccagtaatttctgttgatctcatactcaaacctttgcagtttcatgaatcctcggccaaacttaaggaggtcatactggctgattcccttactgttagaatttcaatggttactctcattgagaagaggatggcactcgagatggggcaattttctggttttcttcattcactaaacacaaaagccatgtcctcccaaagaggattggatacatatttatagctgcttgtagcagccatgcagccatgctagtctaagagggtgctgtcagcatcccaacaaactgtcctagagcatctcaacaaactgctgtcctaactgtcctagagcatccaaactgaaagtagagatgctgtcctagaaagctgaaaagcaggaaaaaggcaccacaagaccaagaccaaccagccaagacttattcctacattctccccctaagtcttgtgcgccgtcttgtgggagagttgagccatcccgatccgggagcaaagctcaaggaacttgatcctcccaaggggtttggtgagcaaatccgcaagctggtccttggtgttgatgtagctcgccttgatgctcccttcctccaagtagcttcggatgaaatggtacctcactcggatgtgcttgctccgttcgtgaaaaacggggttttttgccagggccagagcggacttgctatccaccctgagctccaccgctccagtatctctgccgaggagatcactaagcagtcgagcaagccagagcgcctgggtcgaagcggcggatgctgccatgtactcggcctcgcagctggacagggccaccacctgctgcttgattgactgccagctaacgaggcactcgccgaggaaaaagagaatcccgctcgtgctcttgctggtgtcgatgtcgccggcgtggtcgctgtcgctgtacccgacgaagtgtgccttgccaggacacctcgggtagtagagaccgtggtcgagagtccccgcaacgtagcggatgatcctcttcacagcctgctggtgctccgtcgtcggtcgctgcatgaaccgactgacgtagccgacggagaaggccaagtccggccgtgtgtgggtgaggtagcgaaggctccccacaagacgtcggtactgtgtagcatccacctcctccgctgtgctgtcgcggctcagcttcagtctctcctccatcggagtgagagctgggttgcaatcggtgagcccagccagctcaacgacgcgcttggcgtaggcggtctgtcgaagcgtgatcccggagttgtcctggtgcacttcgatccccaggtagaaggagagaggccccagatcactcatctggaaggtggccttcatctcctccttgaacgccgcgacctctgcatccttggtgccggtgatcactaagtcgtcgacgtagacacccaccagcaaggcatttcctccattgccccgccggtagatggccgcctcgtgcgggctttgctcgaagcccatccccttgagcgtggaatccaacttggcattccacgccctcggtgcctgccgcaagccgtagagggccttgtgcaggcgtagcaccttgccctccttgccggggatcacaaatcccggcggctggtgcacgtagacctcctccttcaagtcgccgtttagaaacgccgacttgacgtccatgtgatggacgccccagccttcctgagcagccagcgcaagaaggagtcgcacggactccatccgtgccacgggagcgaaggcatcgtcgtagtcgatcccctcctgctgcacgaaaccgcgtgccaccaagcgagccttgtgcttgacgatggctccggcttcatccctcttcagcttgaacacccacttaagggtgatcgcgcggtgaccacgagggaggtcagcaagctcccaggtgcggttctcctgaaccgcgtccatctccgactgcatcgcggcacgccatgccgcgtgtttctcggcctctgcaaaagaccgaggctcaccgtcgtcgcacgcaaggtgcaactgcgcctccaggttgcgaggcaccagtcccggcaccggctggtcgccgagaagatcctccatcgtacggtaccgtagctgctcgccgtcatggtacgcgtcgatgcgctccccgtcgtgggagagcggagtaacgaactccaccgggctgcgctcaacacgagctggcgtcggagtagacgtgcccggaggagtggctgttggtgctggagcgtgtggggacaccggctggggtggtgtcgacgaagagctcgtcgtagtcgaagtcgtggcccgagggtgtgttggtgttggagtcggtggaggctcggggactggggtagacacgctcggtgaagaagagctgcctactcccccagctccctcgaagtggacgtactcgatggtgaagtcgtcgtacgtcggagtcgaaccatcatccaccgccttgtcccatacccaccctcgcccttcgtcgaacacaacatcgcgcgtaatgcgcacacgctgtgtctccgggtcgaggatgcggtaggccttcgagccctccgcgtagccgatgaacacccctggggtgctcctgtcgtcgagcttgccgatgtggccaagctccttggcgaacgcgaggcagccgaagacccgcaggtgggagaccgccggcttgcgcccatgccaagcctcgtacggtgtcctgccatcgagggccttggtaggcgagcggttgaggatgtaggcggccgtcaccaccgcctccccccagaagatggccggcatccccctctgcttgaggagggcccgagccatccccacaaccgtctggttgcgccgctcgacgacgccgttctgctgtgggctgtacggcgcggtgtagtggcgctgaatgccctcatcagcgcagtacgacgcgaattcagccgccgtgaattcgccgccgttgtcggtgcgcagcacgcgcagcttgcggccgcactccgcctctgcagcagcctgcgcatgcctgatggcgtccgcagcctctcccttgctgccgaggaccatcacccacatgtagcgggagaggtcgtcgacgagcagcaggaaataacgtcgtcctcctggtgtggccggtgtcactgggccacacaagtccccgtgcacgagcccgagccgctccttggctcggaagctcgtctgctggggaaaggggagccgccgctgctttgtcaccacgcagacgtcgcagagctgctccacgtggtcaaggcacggcatgcctcgcaccatctccttggcactgagctgcttcagggcctcgaagtggaggtgctcgaagcgctcgtgccactgccacgcctcgtcgtcccgacgagcggcgaggcaaactggatgtgcgacctgcgcgctgaggatgtagagtcgattagtgcctctggttaccttggcaagaaggcgacgacggcgatcccaaatcctcatgagtccgtcctcgaccaacacgcgtgagccgttctcatccagctgtcccacgctgatgatagaattcctcaacgcggggatgtagtagactccggtgagcagcctgtgctcaccggacttggcggtgaaggtgacggagccaacacccttgatctccacgccggaggcgtccccgaacttgacggtgcctcggacgctggagtcgaactcggtgaagaactcccgtcggccggtcatgtgatgggtggcgccggtgtcgaggtaccacccatcagccttgtcgttgctggagccgtcgcagagggagacgagtaccttcggctcatcaaggtggaggaaagccgctgcggccggtgccgctggaggtagctcgatgcttgcgtgagctaggagcagagccggctcttcctcctccacccgtgcgacgtgggcctggccgcgtcgtggctgtcgacagtctttggcccaatggccaagcttgccacagttgcggcaggtgtcgtctcgtgccggcttgtggttgccggtggcaacgccctgggcgcctctgcgggcgccaccctcggcacgtcttcgcgcccaccgtagctggacacctccccgcgccttgcgcggcttatggccgcctgtcggggaagatgactcccccttcctcccgtcaccctgagaggcctcccactgctcccgagtgagatggagcttcccgccgatggtgatgggccccgagagaggccgtggctcatcaccatcgacgaccttgaggcgacctaacgcctcctcgatcgacatcgtggagaggtccagcagagattcaatcgagcgagcgatctgcctgtacttctcagggacgcagcggaagagcttctcgacagctctctcctcgtcgtaggtgtcgtcgccgtactgcaccattttctgcaagagagtgttgagacggagagcaaagtcatcaacatcctcacctggcttgaaggccaggttctcccactccttgcggagtgcctgcagtgtggacttgcgggcgcggtcgctgccgatgcgtgccgcagcgatggcgtcccaggcctccttggcagtccgcttctgggaaagcgagaactgcatctcgggcggaactgcagcgatgagggcatccagtgcccgccgatcctcgtcgtagtcgacgtcaccgtaccggactgcctcccacatgtgccgcacctggagcctcaccctcatcaccgcggcccactcgatgtagttggttttggtgagggtaggccacccaccgccgggaccaaaatccctgaccaccgtctggacgccgtggtgaccatggcgccggtcaggggagagggagccgtgccgcctgcgagggccgcgtgcgggctccgggctgccgccggcacgcccgcgcccgtctgggttcccgtcggcgggcgcacggtcccttgggccgccgccgccgccgtggaggtgggctgctgcccaccgctctgctcgctcccgtgcccttcctcttgccagctcctcaagctccctgtcagcggtgatgtcgccggcgatggagccgttgatgctgctgcgcaaggtctcaacctctacctccgccgcacgtgccgcatcttccgccgcctccgcctccgcctccgccctggctgctgccaactccgctgccgccagtctggccgccctcgctgctgctgcagcggtctgagccgttgctcgcctgcgctcttctgctgcggcgagctcggcgtcctgctgacgccgagtgctcgaggcgaccgaacgccgagaccgagcgtcggacatggcgcacctccggggggctgctgtgtggagagggggaagggaaaggggaaggaggagcaaccggtgctgctgctgctgctgctggctgagagctcaaccgagcttgggaaggggtggaacaagagatgtttagcctacaggaaagtgtggctctgataccagatgttagaatttcaatggttactctcattgagaagaggatggcactcgagatggggcaattttctggttttcttcattcactaaacacaaaagccatgtcctcccaaagaggattggatacatatttatagctgcttgtagcagccatgcagccatgctagtctaagagggtgctgtcagcatcccaacaaactgtcctagagcagagcatcccaacaaactgtcctagagcatctcaacaaactgctgtcctaactgtcctagagcatccaaactgaaagtagagatgctgtcctagaaagctgaaaagcaggaaaaaggcaccacaagaccaagaccaaccagccaagacttattcctacacttacaatcctttaccacaagttcttccaatgatccggccctgccaaggtactccagccactccacacttcctactttcatgcaatcaacaaggtggaaagtacaaagactcttgcaaccaactgccaccgagagaagccctcttgaacttattgctggtgcaaagttcagcctgaaagaccttagtttcttgcaataagccagatagccaataccagaatcatcgatataggagcagaagtttaatgtgagatcggtcagtgaagagcagtgagacgaaagcacaaggagcccttggttgtccaactgcttcccgtggatagatatccaaccagagtaatcaatcactactttccacaaattagggaaccgggagcatagtgatgccaaagcttcagttgccgggtgaagaccacagccaacatggatagcatccctttgctccgcgtcgatagtgtagagctgcttcgacacaagggaaagagagttacgatcacttgtcttggcaatcctcttgatgatctctgcgagcagtggctctgacaggttgtccattgggcaatacggttgccttacttaagcaatatcaatgttcagctggcactacggactggcctaaaagtaataagaatgaaacatatgagatgtgatagtcagatggaattaatgatattaatttagaggtaatactttcgataagatggcaggagtgtttccaattcaactaagaggtagatttagattagcaaataactttaaatgagggaacctccctatgcatttataaatgactaagcaaataaagaatatgcaattagtctaacaacctgatcaactgaattactgaagcagataataaaaagggaagtttctaacaagcaaatgagcagtgcaagtccagaaatactagcattcatctgctgaaactgaactaacatatttggaagcactttactagtaacatgaatgaaaatcacgcgtataacaaggtgcagacgtgcagtgactcattattattttctacaattcactaccttcacaataaacagtacctaggacagacagcgccaactttatctctagtagtctagttggctaagaaacataagaattgcaaactattccgaacccaattaagaaaaacctcaaactattctcgcccttattatctcaataaaaaaaatctcaatcagaacaggggaagggactgaaaacacaactaaaattagagaccggatcatagataccttagagaaatcaaggacctcaagattgggggtttcagagaaggaaaatccaagaaaaagaaagaggcgtcgttcttgatccttcaacgcaaacggaaggcggagagcacccaagaaacggcggcggagaccgaagattttgggcggagaagcaccgccctctactgccacggaggaggagatcgagtgctaaaaccctcgcctcgcatggcgtctagcgatgaacaccacggcggcatgatgtatccaggaccaaacgataaggacgaaaataagggcattttgcaaacgatcgacctaaacaaggatctttttgcaaaggaaaaaaagtttgatttactccgtaattcgaataccagacatttagtatccttcagttatttaaatcggacaaataacttaaaagttaacaaccacgataatttgagatgataattcagatcttttccttttgcaaaatagtgatactagcagattagcagtccaagagaggatcctttttgaaaaaaatgggacagaagtgctcaaaagttaccccgtaattcgaataccaaacatttaacatcctcagttacttaaacaagacgaatatctcaaaaattaattcggacgaccacaatattttaaacgtttttttcttttgcaaaatagtgatactagcagactaagcacgataaattgaaagaagtaggacttctaccaatgctagcgacactgctaccaaaatagaccgaacgttcagataatgaggttccttgccgccctctgtaagggttgcaatggggcaaatgtaattttcgccatgccaaaaatgcatttttctagtttttttccatcgtatctgtccctcacgtcaccctgccgtccttctcgagaacggcagggtctacttctgtaaatattattaccggtacaatattttctgtaaatattaaaaaataaaaatgaaaaaaaatttccgttctctagctgtctagcacaaggggtatttccctctccaattgccctgatgggccggaatcccagcccatccaaataggccgagaagctcaatatgggctctacttacacttgatggtagctttttttttttcaaatttacttttggagaaacaattacttcctctttctcattctgagagaagaagaaaataaaataaaaataaaaagtattgcaacttggcactgagaagtgagaacagatagaaaaacatcaggaagcacaaagggtggctaggtggagcagaagtgcagaacacttcgtttttccagtgaaaaggatgtagtgtcctttcttctgctcatgataagaggattcctccaatcataatctgaagaaaaaaaaagtttcatcttatctagaatgaagctataggactgtactacaggcagtagcagtacaaaagacattagtaaaaattcccagcttaattaatcagtttgtgtagctttagttatattatgtcattatatgcagagcacagtattttggttgatcattgttcaggcataaaatctgttgatgcagcactgcagtgacaaaaagaaacaagagaaatcgaattatatatttatatatctggtaccctaccagaactatataagaagcgatcaaaagaggcagagtgatgatatgcatgctcatggttggagcataataacttatgctgaagaagatgtcagagttgcactaatcaagcactagcttaattagctaaacaaacaaatctcttgtctcatccaccaacgaccagggaattgttgctaggtgaatcataatccacatcatattacttgtgagctagctaggaagctaggcaaaataaaaaaacataatcaattctattattctaaaccaaactgtgtccttttaactctttctgttaagttgattttatgatgtccctgtcctgtccgtccattgctatcaccaacttttgcaaggagaggagcagagaagagagatctggccgtcttcttgcttgttgcgtttggtgtcatggtccgggcccacacggcaattgcccaattctcatctccttttgtctgtctgtcagtgtaagcacacacaggctgcgtaagcactacgaacacctgcagctcactgtccggatcgtctgcatttgcatctttcagaagagaatgaatcttgcagattagtggtaaaagatctgtccagtgccccagcagccagttgattgattagtcattgatgttctagtggccaaaaccacaagtctgaaaggagtataaaggaaacaggtaaaaatgatttggggaaaaaaaagaaacaggtgcatgaacttgtcagcttcactgttaattccatggtttttattgtatcttggtctgcatgttgatcgccaaggagagatggatggatcaatacatgcatgggcagatgatcgattgtagcgtggagaaatggagaatccgtctgcaaattggaggcttggattttatcctctctttttttttgtcacttttgtggcgattacgactgctggtgtgaacaggtgcagctgacgagaatctgcttcggagacgttaattataattaattaaattaggtaaagaaaaatagcgatcgatcgttgcagcgtgtggctgcaatttggcctgtctgttcttcattcctttgaaaaaggaaagagccgtcctttgctcggaattgctgggaatactatagcccatcatctcgtatgattcgagatggacagattgatcattggttcttgctgtgactgcatcgatcgccagctgcgtcggctgccaatattccacggcaattttttttattttgtctcttctctcttgattatttctgtttgagttggctggtgcagaggttgtgtgtcctgtagagagattaggcagaagtttgaaggaatttgattgaattaattcagcaacgttgggtgtttgttcgagcctactccctctgtcctaaagaaataaaaactttaaaaatataattttggtttttttttctataatgaaagtaattgactgtgagaatagtgtacaaagacaggaggaggcagtgacctgctactggtaccactacattaagactgtgtttagttcatgctaaaattgaaagattggttgaaattgaaacgatgtgacggaaaagttgatagtttatgtgtgtaggaaagttttgatgtgatggaaaaattggaagtttgaaaaaatattttaaaactaaacacggcgtcactagagaatttggcagtgcatttgcctttataaagtcggcatatatagctgtctaggatatgaatatgatgcacttttcctagtgccttcaggtcagcgaaggctggtagtacgagtagaataaaagtttcttcagcaacaagttaaggtaatttgcatatgcgtgtctttgaaattgaaacgtgtgtatgtacactgcaaacagttgtcggacaaccggtgcttttgtgtgtacaggtatagctacttggcaatcacgtggtcactcaaataactaatgctaatttgtcttataaaaatactaactaatgctaataattaatggtagtaatggttaattagttccgctagcctatatgcagtacagtgcttcactagctcaacttctcaagtaggatgcaggtatgcaacgacgaccaagacgaacgtacttgcaagacactacctaattaagtggtatcctgtgatgatcaactactctccttctcctcgtttcttaaaaaacagacttaaacttgaaatgagatgtaacatattatactactaaaaattttgatatacatctatctgatttataatactagctagaatatattacatcacatattagatttggttttttaaacgaagaaagtatattttttaatttggtcgataacactcgatcaagctttgcaatttacatggcggtcaccgtcatggaggggagggctcgagatctgccactgtataccaatgtcgaggctgtaacacatgcgcctttctcaatgatgcaatactcttataaggtatgattcgctctcgttgggcctctctctgtttattcttttgtttttccaatatattaagctaggtatatcagtactgtgatagagcgcgcaatcaagctaattaatcgatcggaaggcactaaattagaattaactactattatactaattttattttttaatatatagcgtcgttgattttttttacaaacatttgatcattcgttttgttcatttcctttacaaatataaaaatatttaaggctctgtcctcggcacacaaaacgaagcagcgttttagtgcgtgattaattaagttttagctattttttaaaaaaatggattaatatgatttttttaagcaactttcgtataaaaactttttgcaaaaaacgcaccgtttagcagtttgaaaagcgtgtgcgtggaaaacaaggagtaggagttggaaacttgtagtaccgaacggagcctaagtcataattaaagaatattcgatgataaatcaagtcacaataaaataaaataaaataataattgcatatttttaaataacacgaattgtcaaacgtatcttaaaaaatcaacaacgtcatatattagaaagtatcaagttcgtactatactatacacaagatcaatcattttcataagcaaaacccttgtacatgggtagttcttttccataagggcaactcatctctttcttcctcttccaacccctctacgcttccctctctcttttctttcccctcctatctctccctttttttaatggtgattcagcaggatatgcgagactcgatccctgaatttgtcacagtttttttttctaaatcaaatttctattagttcgatgaaatttatagaaaaaatatagcaactattacaacatcaaattagtttcattaaatatattttaatatagtactagtatatttgtttgatattaaaaatattgctatgttttctatatttggttaaacttgaaatatgaaacggagagagcatgtcgaggggcacttcttatttgtcctcaatcgtacttcctctgtcttaaaaagaattaaactctaggaataaatcagaatacacgtgtattcaaactctagatttatccctaaagtctctctgtcctaaaaaaattaatttatagggataaatctgaacacacgtgtgtttagactccagattcattccaagttttttttttaaaagggacatatggagtgatctgtgtacgtatacagtatatttgcagcagcagtaggtactaggataggagtacgtgagcgtacgcatgcctgcatgcagaatctagcgagcaaaacgtgtcgggatatttcggattttcggttgccgtgtcgtgtcaagcgcgactattttattagtaaattttattattttctactcacgcgaatacgtacttccttcctctgtaaaaaaaagaaagacaaaccttgaatttctacgttcaacgtttgatttttcatcttatataaaaattttttacaattaatatttttattattgttagatgataaaacatgattaatattttatacgtgacttgtccttttaaattttttatatttttttttaaataatacggacggtcaaacattagatatggaaacctaggttgttaattttttttggacggagggagtacgcggccgatcgatcgacagccgatgtaagtatacagtatagtactagtacgtactaaggtgacgtgtccaccacgcggactcgacacgatcggttggccctgcgtcgcacgcgtgtcccttcccgccccatacgtgcgcgccttatccctgcttccctgacaggtgggcccgcgctgtcagtggcagccagcatgacaaccacaaccgggcaaggcacgaagccagtgtgtgtgaaagaagcttgaatagctagctggtcaggttggttaattaagagcaagggtaataatgggctataagcaagctagtataggcttatgtggaagaaagagataaataaaaatggagagtgttggctctcatgtaagagctaactacacacaagtttcaagaaatatgcattaaattcatagtgagagaaagagagagtatgaagaaaataaagataaccttataactaacctactatacatgttagctttagcattgactaatagtaaatagtgagctctactattaaacctgctctaatctgctggttaagtatttagttacagtatgttttagttttaggaggaagactacctaacgatataccgtaacaacggaatagttgacatcagcatagcaccatagctatcggaacttatacgtccggtatcagacatgatacactgcaactattactccagatttagtatataggtatcatactgatattacctattccgttaaaacggtataccgccctttatagtactgtttaactaatcatcaagttgttgctgaaacaattaggtctaatgtgcgtgtggctactaatattagttatagtactattagtggtagctttcatggaaattttgtgggggcaatacggtggcgttaggtagggtggagcgtcttctcgatcgatccgtcgatgccttaatttgctcggtatcaccagaaggcgtagcagctgccacatctcctttttttttctttctttttctttttcttgctttatttgcttcgttgacttgaccctgctttctgaacaagaagcagatcagttttaattaatactaattctatcggttttgaaactaatcatgtaagtacttttttaagataatggatagtcttatgttatatactatactatgatataattgattatatatataatgcattcctagagaaaagaacaaccaggataaatatttattttacacagaatggaagaattgttcttgatgcatatatggcctgttgagattaattaagaaaaggtggagatattttcttaggggaggaaaagaatatcataaggataatggatgacctcatatcaccatcacatctcctggtctcgttctcccaaggccccagcattggctctgagattaatggagaattaaaatgctaagagcaggtaaaatagcaggctataagccagctgcaaacatattttaagcagataaatgagaagagagaagggcagcgggctatagatttgtagtcagctgtagcacggactccaagacacagtgtgtatgacaggtgggaccagatattaatagtgtagtatataactattgtatgaatgagctattagattagctatagatgaattggagctagtagttggctatactattaaacttgctctaaaagaaaaggtattactcccatacagcaacctcatgcatgtggtcccctctaccttttccaaacttttgcaggaaagtccacccccaaaaaagtacattgatgtgtttatagttctattaaaaaaaacatgtttctttactggaggagtagttcttttcgtttttggagtagaattcatgctgcctttttcactggggagatagaaatagccatgccagtgtaaaatgttggagaaatggcatatggttgcaactttcctggcacatcaactataccaaatggagggaggtcatgccataggtaggcgacgtatatatatttaccttaattaaccccctccttggttcttctaatcataaaatttagcaacaattagcaatcattggaaatgttgaagtggtctattggcagattgctcaaaagtttgtttaagtacatatatttcgcaggccaccactcgtatattaatgttcccaattatccctacctatggtacataaagtaatcctgagtaacgagagagctcctactacatcgttaactcaatatttttttggcaatagatcaaatgggcaccaacactgagcccacacagcgatcgaccatgcacaagaattgccatcgtcacgagtattctagcactcaacgtaagatgtactgtgttatcctacgccgaagaaacaattttttacgtgataaattttactttttcatgaaaaataagtaatgtaatatctgtaatcataactatgtcgcgcacccttcattttttttcttttatttcaccaacttgtttttaattaccaaacatctacctagcacaaggactaacatgactacaagtatttttaacacttaacgtatgctgtcctatattatcctacatcaaaaaaaccagtttttgcataataaatcctccttattttggataagataaaaggagtacacgatagctatattcgtaacgctatcgtgcacccttaatttttcttttctttcaccctactaacttttagcaacacgtcgtgatgattaatatagaacccagcggtcatccacctagcacgaggactagcattgtcatgagtattctatcactccacgtatactatcgtataatgtgctacatcaagaaaccgccttttagagcaaaatcctagctttttcaaagaaaaagaacccacgtaccatatatgaactaataactctaccgtgcacccttatgtgcaccaatataaagcccacgcaaccatccacctagcataagggttagcactaccatgaatactttacaactcgattatttgatgtcctatattatcctatattgaagaaacaattttttattgctaaagaaccaactttttatgtggcaatccctatatttttctttacgaaaaaaaaacccaacagtacccaaactcacaactctaccgtgcacgtttgccttatctcttattttgccttatggtgtttagcaacaaattatgagacaaacccatacaaccatccatcgagcacgagtatgactcgatgtataatgtcgtatattatccttacgtcaaaagaaccactttttacgtggcaaatattatttttaatgaaaataatacctcacagtacacagattaataaccctcccgtgcatcctagattttccttttctttcaccctacccatttttttggaagcatttcacctaaactggtcaaaaaagggttgaaattcttgtaaagtggtaggcccgtgacccctcaaggctccaattcccaaaagtctcaaccaaaaaaaaaagagaaaagaaaaaagaaaaaaaaaatctggtgccgtggtctcaatcaccacgtgctcttccatcctccataaatactctctcctctcctcgcgagtttcctcatcaaaatcgccttcgcttaataatctcctcctccgtattaaactcggtttttttagatattcccaagaatctctcctctcctttccattgttgctccgctcggattccgctcttcttcttcttctccgtctccgattcggtctcctcctcctctgctccgaccaggattctgcagcggcagcggcagctgctgcggttggtttttcaggctcggtggcggcaggcagcggcatgtgcgtggaggaactcgaaggcgcagagaggctcgattttggtggggttgcggagctcgagacaacaccggcagacttcgaggtgagtagagtaaactcccggatttcggaagctccctgttctttcttgctttctttctttctcgtgttcttgatgcattcgtttgtgatttgatttcgcaaccggatgcttttctttgggtgttgggatgatcggttgaggggaaatccaactgaggtggttgcgttgggtatactcttcgcgtgcccgaatgcttctattttcttattttcttttcttgtctggaaatctggagaaagtaggagagattagttagtttattagtaccactgaaataaatgaactcccttatcaattaatataatataatatttcaacgtttttttagtatagtaacaactagcagcaaataatttaggaaattgtttgttcttgaacggaaggtgtgaatgggaagatgcgctttgaattgttcagcggcaagaggaagtttctaggaggagagggattcagattgcgtgaaaaacacaatctttttattttttggggtgccttgtcgtagcttgtgggtgacttgtctgcttgcgcattgcgttgttctcctgtacttttgattctgtggcgagaagtcgtgtgggattttcagttgatgtgttcgtactactgcatcttgtgcgcatgcgtatctgctctgattctgatatgctgtgataagatttttatgcatgtgagtgacagtgagtactacctgaaaactcttcgtaccaagcagaaatgaactctcttaatactgtactgcagaattcaagaaagtagtgtactttgtttctcttcaaatcaagaaagtagagcaccaaatggatattagaaagaatgtcctttgtgatgttatgcctttagaagtcaaatgttatttacatgcagaactgtcaatcaataaatcagtactggtaaagttcagtggtacttctctctcagttgaggccaagaaaaatgttcttttcttaaaatgctggcctcctggttaagactgttgtttggacaatgcttagtgacccttgtgatttgtagctctagaagtactacataatatatcttctgatgaactgtgaaccccgtcgttagaccttgatgggatatctttgtcgctttatcttgtaatgatggttgcaagcaggaaatggattatggagtgttgcggaagaatgaacacctggtggattttcatggctctagtactaattagtttaacagggattaacagttggagtggctgtagtcctatcatattgtcacaactgttgtgccttttttttgtcaagtcatatgctcctgtgtctgttttgcctgaaaaatactaagctgtactgcacttttgtgcattcttgggtgttttgtttactaacgccctctctagaaatggccactcgtaggcttgtccaataagggtttgcctcttgtcacctagttgactgaattggggcttctgtttctgtgtcgctttcaactaggtggattagtatttaccgtaagtagttcattttcgatgtgatgaatgatgatgtcgacagcatcccttaaagcaatttgtgctcttggcagagttgaagtgctagtatattcatttgaagttttgaactagcatcatgttctgccaaagttggcattgatctgttattttttataaggctgacgtcctctgccaatgcttgttactatccttaaggcatttagaacttgtgttgtaattatgcttcatcagagttgcttcttgtttcttatttttgccatgctctaatcttttacctttcttggtaatgtgcagatggagaaagtttgtgagaacacagtatctcttgatttcaagcaggctaggtcgagcagttttgtcccagttatccgatcaggggactggtcggatattggaggtcgcgattacatggaagatgctcatgtctgcatctcagatctagctaataattttggtcataattcagtggatgatgagattatttccttttatggggtaacttcttgtttttactctctttattttgattcttcagttcccatttgatatggaaatcaatacctagttgagcattccagagtcctaaaacgtgcctaatccattgtaaagtaattaaaaaaatgtattatctttaagtgcagtgaactcataacagcagcagtttagagagattgcatctaccaaatcagatacatggatcatgaaattgtacatgcttgtctttttctaagatcatcttgtccttaaatttttcgcaggtctttgatgggcatggtggaaaagatgcagctcattatgtgcgtgataacttgccacgggttatcgtggaagatgctgattttcctcttgagctagagaaagttgtcaggaggtcatttgtgcaaactgatagtcaatttgcagagaggtgctctcatcagaatgcactttcttctggaacgacagcgcttacagcaatgatttttggaaggtactattcctactgcaggctagaagtagaatttagcctaggtcaatctgcttcttagcatgctatgtttgattcttaagtctggcaaactactcccaagcttgttctttggttggttattccgcattttctacgtgtgccttgcaaatattttctgaaagcttatccaatagcataaaattcttaggaatgttccacttaaggagttgaggtgttaggagtttcccctgaacctccgtgttgtcactacagagccctttgtctacttgttcagagagattcaggcgatttcatattctaatcattaggatgtactgtgcaggtctcttctggttgctaatgctggtgattgccgagcagttctttcaaggcgtggtaccgcaattgaaatgtccaaggaccacaggacttgctgcctcaacgaaagaaagcgtatagaatcacttggcggctatgttgatgatggctatttgaatggtcaattagcagtcactagagcattgggtgactggcatctcgagggtctgaaagaagtgggtgagccaggtggccccttgagcgcggaaccagagctcaagatgatcacactgacgaaggaagacgagttcttgataataggaagcgacggcatctgggacttcttctcgaaccagaatgccgtggatttcaccaggaagaggctccaagagcacaatgacttgaggttgtgctgcaagcagatcgtcgaggaggcaataaggcgaggggcctcagacaacctaacggcggtgatggtctcattccaccaggaggcccctcctcagctcagagtgaacaggacggggagggtcgagcggagcatatcggctgaagggcttcacagcctcagggtgctcctggaaggccaatgatagctccactgctatcatcagccttgaagttgtgcagaattgaagagaaaccttatcttgatgttgtgcagaattgaagagcaactgtatttagtgattttcggcatcttgctgtttacccccaatccattgtcgacattccagtgtgtgttattgtgtgagaataaaaccaacgaacctgagatctcaccttgcattgtgaggcccaggcattgtaaataagttgggagatagtaggtaaggagtgtgagtagtgtgcatccagggggctttgaggctcattatgcgatgtattcccctgtcatctgtaaaaaaataaataccgggattgttagtgtgattaaaagttctatcgtgtgatgaatacctctctgactgttcactgttggtggtcttgtagtggtattcatgttcaggctgtcagttgtcggtagtatacaaagatgcagtactacgtaactaaaactgaaatactagcagccaagatacctgaactaagatctgattgaggaaactaaacatgatgttgattgatttgaaatgtcaccatgcaggagtacagtataacaaaccatccaaatcagtcagttaaaaagttcatgatttcatgagattggctggtcagatcagatgtacagtactaggctggatctctgcatgctcacgatcgtgatgtcccactgtgattttgatcgcgtgagatcgattcgccgtctgtatgtgcgccgactcaaacctatccttcgttgatgcttcttctccagcgatctggagtacccatctatctatctatcgggtccagcagtagctcccaggtcattacatgtttgctttaggattgtcaggtaagcaagtcataatataagcagccaacgcttgaacacgcaataaactgaacagatacagctgatctctcaacatatgagaaccatcaagaaaataaaacagtactaaccacattattgttgtctggtctctacttcatcagaacaggaacaatggtttgctggttgttatcggcatcatcagtccagactgaggctaaatcagataaattccatggtcagtttgaaactgggatgcagggtgagtatccatgttggggtagatagaggagctaacctacctattgacagcgaccaaaacagatagatacacaacaaacttgattctacaccataaaataaatgccaatggtgtttgtgctctttgcatgcaagtggggatcatggtcgtcgcatcttaatattcaagggcacctccttgtaggagactatcttttctgctgcccgtcttgagggcctcccaactgaagatcttctacctatcacctgctcgtcagaaggtttagtcgagcaactgcggtcgttttgcatatcatttttggtctgctcgatcaaagcatttgaactggaaggagcagacggggcaactgtatcttcctggacaatttcaaaagtgccatttgtgacctcccaaggtccagggtccagtcttgaggattttctccttgacaattttctgcagtattaagggcagccatgattgacatgttccatgcagaggaaagtgcatcgttggaatataggagagagttacctcttttgttcatgctgaattggcacgcttgaagttgagtcgcatatggcattgatgcagtcctctttgttcgaggccaatcgactctcaaatgattccagcttccgtttgtttgcatcaatacgcattgattttctgattggacagagcatattgtttaggtgaattgtgtgatgtaccatgcatcttaaaccctgctaaaatgatgtgccataccttggtggctctggatcctcaatatcaaatttatgcgcctcacctccagcaacgctggaacctgcttcttgtatctcctaatttcattggacgaaagaagtaggaacataataagaattaagacttcttcatggataaatgtgaggattatttacataagaactgtcctgcccacctccagatacacttccttttgtgtgtgcatacttcgttttttctagtacatacaatcaggatccagattttactaaaaaataaattaatatatgtaagactagcaaaaatttgatgcgaaccactctgctcaattaccttgagttctggagcctctactacttgcgctattgcatcacatggaagttctttttgcaatgacttcatcttgccaccacaaatctagcacaaaatcataaccacattgtgaaattttttttgaaacagaaaaacagaaagaaatagtaaaaccctaccatatcttttccagcatttggttcctgcagctttggaacattagaactaggagccgaaggaacagtagcatcctcatgcaatttatcacagatctctgcgacctcaaaagatccagggttcaatctggcagaccttctccgtcgagtttttctgaccacatgtgcccaagagttttgaacaagcttaaatcagataatgatgcaacaatgaacgcattctgttataagcattaagcattgattaccttggatcatcatcatgcgatgacccattatattccacatgaggtctgcagctatgttgcactgtgttggtatccattgtaacttcacatgattctgacttccgcctatttgtgcacctgtttgcaaacatgctgaataagtagtgatgcatgaaataggctactataacccggtcaaccagtcacccactcaaacatcagtaaagagatgaaaatacctcttgtttgttttatcctgtggaggctcatgacagctagtataagatggcacagctgctgagaagaaattggcaacaaatgaagattagaattttactagtgtcctaacttatggcagaggaaaaaacataaaacttcaattgcttcatataaagggggtaaattataaccataaagtaggatagatgaaacgattgccaggtatagtatctagttcaagaaagaaatagtgagaagagtgagcattacattgaatttcaaccaaatgttctctaatagaacctgcagccatttgatgagccttagttggtgcgcatttggaagacctggtttttttctcctgattatgttgcacgaacagaacgatttcagaattcagaactagaaataatgcagctaaacatggtgaatcatttgcttaagaatttgactgcataccaatatctttgctctattttgttgattgttagaagtcttactcatcttctgcaatagtagacgatgagaaaagcatgttatatgtaacaaacagaggttcatacagtcaagctttagaattacctcgagttcagaaccctttactttgagcacggctattgtgcatgcaagttcatgttgcaataacttgatctgcatgtcatatccacagattaatccccaaatcagaaatcatactgcatttgaaaattcaaacaacaaagaaccagaggcagcttactctatcttttccttgatttatttcctgcaaggaagaagaaaacatagacatatcaaacagtctgtaactaccacaaaacaatcagcaatgaagtaagacaaacacttctcatttgccattatgcatagctataactcaaactatgtgctcaacctacaggcctggtgaaccagcattgcacaagtataaacaaacattgacacaagaatggtgaggtagggagctaatggataagtagacaaaccgcaaacatctgcgaattagcctgcacgagttgcaagttcttctgctgcatggcttgcagtgcgaggcggattttctgcaactctactctgctgacttcaatgactttgctgcaaataagaaagcaaaaaataatttaaaaaaaactgtgctacttgagaaaccgcaggttttatcctccgacaacaaaatggatggtagaggcaatgcatactttcgctcagcaagcagatgacgcaacttggcgttctcctgaaagcaagggaggaattaaatggtttaatcggatggaaatcggaattactagcattcaacttggcgctgctagggttgtctgcttgtttgagttagaaccgaaatcccccgaagaaaaaaaaaatagagctagaactgaaatcaccttgaggacgtcagcgatggcgtggacggatccagtagggttgggcctcccggtgttggtgatgtcggcgagcacgacgggtttccccggcgaccgaaggctgccacccttaccggccgggatcacaccgccaccgcgcgccgctgcccctggtttaggaggaggtgcggaagctgagcccgagagaaccccaccatggaatgccacgggtagctcgaaatctaggggatacgatttttacctgcagcggccgccatggctggcccagcggccgcggggcctgtggttgcgcacgccaccgccggaggtgaagccggcgaggaccctcggagccgcagcgcgcgcgcggggagagagaggcggcgctccggtagccgcgcggagaggaatccgatgaggtttcggagaggagaggagaggggaagcgacgcgccggagttggaggcggaggggaattcgaaattttgggggaggagtggagatgaaatctgaaatggttggaattgatggcgacttgacttttttttttttttgaacttgatggcgacttgacttgtcaacgcgagttccttctctcttttttttttcttttctccaccatttgttgggccgtgggctatgagcccgttatgggatccgttctagcccatgggctttttagagtagagccttcgcttatgagttgagagttgagacacgagttcgtttgccgggatggggcttcaactactcttctcttttcagttttcttctttgcatttgcaaaaattgcatcaggttcagaaatgattctatttaacacccaaatttgtcacatagtatgaaatatagcgaagtttgtcagattataaaaaaaacatgggcctattgtatagggtcggtccaatcggtggtatgaggccaatctgaccgtcggtataggggtggtcggatgtgccattcagaccgggtggagaaagccttgtggaggctatggccagttcagtttaaatcaatcaacaaccaacaacgcaattatccaatcgaatcgttctttcaatttcacatgtaccttcgtcctaggtttaatcctaatttatccattttgtcggtttgctctataagccatccttcatcgtgggagtgcaaattcttgtatttttttccccaaaccttttgttcctcccataagatgggtgtttatcctaatctatctaaatcggccctgttaaccatatttgatctctaaactcatcttgatcacgagcttcttaaggtcaaggtggttggcgacttaagtcaacaccacgaggctttagatgatttgtcgtggtgactgaaaaaagcgtcaacagattccactttacactaatataaaacaaaataagttttcttacgaacaatgtcgtgcatctatatgcaacagccggtttatccattattaaagagaaaatctacgctaagtgattaactatacgaatttccctcaacgagcattagttgtatgaattgccgccatgcacaagcgtttttcctctttgctatcgccatcagttgaccattagttaacctcgtgtcctttatttccatgaaaatgtacattttaccaaatacatatgagatactcttatgtactccttgtattggtatcgcacttctaagggtaatggacattttgacacattaacataggccaactaacgattaactgacggtgatggcaaaaaatgaagtaaacacttattggcatttcgattaatatgataatccttagaatccctaacttgtcaacagccaaaaagaaacaacatcagttgccgttgaaacacgaatggcccaggaggccatgaaaggacaacgccaagttgtgttgtcatccatcgatctgcaactgcaagtctgcaacaaccaacaagcagcattccgtaatccgtactcccgtattcataatttttcttcccccctgatattaagtatccatgtatgctcagattcagaagcttccaattgccatgtccagatcagccaacccaactgacaaggcatgtacatgctttctgaagaaacgctcgaacaaatacgcagttttctgtgcgtctgtcgtgagacagcctcgctactttccagggggcaccacctgatgccaaacacaagacctgacagcattgttactcgtgattagtagcagttgtaagtacaggattagtacctaatccggtggcttgatcaaacaggaggccgacttttgtgcaggcatccttccccaaagggtgacaagaaccctgtaaactatgtcttgggtttgcatggtgcatgagctaacgacaatgattttttctgttaaaaaatgggttaacgacaatgatccagacattagaggtagtttttttatttgacgaagataacccactcctgaatcctgatagacatgagcacagcaaacactgggggttgttctaaaagcaagatggcaagatgcatatatatgacctgtcataggtcaaatgcttcattcagagttcagacacactcaacctgcatagctcatcctactctcttaactctcaatctctcccagcttcttcaaaatttcctgcgagacaagatgaggatgtccaagttgtcaatggctactgctgtgatcttgctcctggtagtgatggccatggaggttgagggcattcgattggatgcagaaactcgcgcagcaaccagcaaccaaatggtcaatgtaagtgattctgattcactgaatttgttcatcatggaattgtcttctgttcctttttcttttctttttgtatgtgtgtgctgacatatttgttttgttctgaaaaacagaaatcgacagagaatgtgccaaaggattccggtgactcactaggcgaggcgaagagaagcattgctgggaatgaagttagggctgtagcacacaagttacctgagttccatgaagactactatggtcccagtgaccatacacctagacaccactgaagagaaaacaatctttttttttcttcttctcaatctttttgttcagaatagattagatattagctagtcagcggctgcaggttgtagtagatactgaatttcatctgagcttagttagtaagcacatgatggtagcaacatgtgaatctttaacctatctcttttttcccctccttttcacctcattagtgaaaaggagcggttttcatgtactgacttgttgacaatacttgaaagcaacaatctcaagacgttgtccatatctttttgtgattgtgtttgttcccatgatcagcgcagagcttaatgtgacgattacaaatccacaaggatgtcaataccatgatgtcgctgatataactggaattgacttcgtcagtatgattttcggcaaccgttgtgcaatgacaagaatcactgaatcaagcatactgacaagatgagagaagaacacacaattaagagtgcaagtgcttttatttctacatgacagcataagcgctttattattggcaatgtaaaagcagcaaaaggaaccatcaagtgagtagcctcacttaaaggctttgtttcacttaattatggtgaaaaatgcctgcaccgtaagggagtcatcgttaaagggcatatttgcaaacgaaaagtaatttgtgaataaaatttttatatacgtgctcttagcgatctaaaagtaaaggttaaaaaataaacttcgataaaaaaacctcaaaatcagtttcaaatttaaggttgaaaatttaaattttaactgataagtataatcataaacgaaaaagatgaggaactaagttgattagtttgcttaagaagtgtcgtttggtcggcattaagtaaaacaaattactccagatagctgcactacggcatttgataggcattaggcagtagtatgacagtacagtggtactaactccaacattccaagcgtacattgaggaaaggaaagcaaaacacgagtggtcggcattgccggatatgctgcagtgttcttcgccattgctgtagtctactttacatgtccacgcaggatggcacgccgattagagtattccatcaactgttccgttctccacatgcttaataatgatggcttgatgattgagaagctgattagccagccgcctccaaaaaaacacaaaagccacagataatgatgcagagaaagttgtccgtgacgttagcgagacaagaaacgggagaaaagaaagtgcaaaagtacgagattgtggcccaagagggaggtggccgaagcccacgtagccaatgtggcctagtaacacatggtgggccggcccacgagaaaaatcgcggttgcggatggggatttttctcgtggcctccgcgcgcccaacggaggctttgcgtggccaacgtagaagtagaggatgtgaactggaggccacgggcactagcagagatggcaatggtgaattcatcgtcgggggtcacattcacatccacattcccattcctgtagtgataaaattttaccgttttcgtccctgtcaactacgacggggctacattttctcttgccctgtttcccacgtggtgaatttatccccgcggttaccccatccggtggtagttagcactcagtagccgtcaggggaatcggtggcgtcgaacggcgcgagggagggcgctaacggtggacggtggacggacggcgcgacgatggcggcaggcaccaggcggcgcgacgacggctacaggctccgcacccgcgttgacggctggggcgggacagcgtctgcatgagaggaggcggcagcacgcgtgcctgatggctggtgcgatgtaggcgtgcagcggtgagactaagtttagatatgaaagatgtggaggttgattggttgactagggttaggtgttatatatacatgttaattgggtttcaatattatgagccaaaacatctaacaaagtctagaattagtcctctctacagtgaaggcgagtcaccgcggggggcgaggacggtgaatggtttcacccagggttcacaaagctgacgaaagctggtcggtttttgcggcttttcgacgtttcgacatagctccgaattaattttcgattggaatttcgaagttcaaaagtaaatcttgtcgagattcagtcggaatttaacgaaaattggtcgatttattgaaaaccgtgatatcgatggagctcgaaatttagtggtcaaccggtaatgaaaaccccggttccaccgtcccgcccccgtcatccccgatggtgataagtttgggaccatttgattcccgtggagaatagttattaaccatctccatcccctaatatgtgaattcaccgtggataatcggtgattgggtccctattaccatctctagtcaccagccactattcgctttctgctactgctgctgctagcctttccaacgtgcacattttcttaccacctcgattcatttgtctttgtgaagtaaatgcagcggctagtactgcactgcagtaccacacacctggcctagcttggctacttggatctgagatctgactggagccaagtagccaacacaacacgagcgtgcagtgagaggcgacatttgctgggacatccatggtccatattattggactaattagctagctgacccagcaaaaggggaacaatcgagcttatacaagcgttaagtgacaaaatttgggcgagagaacgccaaatcatatatggtcccgttttctgattttctccatgcgatgcatgctgtcacaggctcagattcagagtttcagacagcaaaacctgggtttgaatcaatagaagtacacaacaattcagagcatgaactttacaatcactttctcttttttcccctctcattaattacttttatgtaaaatacatcacagtcacatactccaggggttcagggctttaagaaagttcaggttggacagcagaatgcggcaacagcaagcaatgtacctgctgcacgtggattagttttcagcaaagacggtatcaagttgaacacaaagcaatgacggtcttagctggaaagaaatcctactaatgaaagtataaactacaaagctggagttggagttggaggagatagaccaccaccatgtgggcaacatacattcatgcgaatacagctgcagaggaatgttcggatgctaatccatgtggcgccaatgcacgcatgtgatgcttaattctcgcttaatcaatctactgcttctaaactaaagtttcgatgtttcttaattatctccagatcaacataggagtaatcaaactatgtgttactggtagtaccacactagatcacctggtaatggcgagtcaagctagctcccaaaatgacctggaggagaatattatctactatctctctctctatatatattatcttttgaaagatccactatatatatagtcttcttgtattttcgactatgcaatttacgagacaccaattggatttgttctgtgatctttacgccgccgtctctggatcacatttcatcaaagagtagttataagaagaaacttggattataaaatgggggacaaattaattaaggtcatctttagctcagcaaaaatctcaaataaatacgagccagtgatccgtgacagcaatgcttggcttgttcttgaggaaaaaaaatcatgagatgttcgtggcgaactagtcgttgtctcgttgatagcatgatccatcgagagggacacgcgtctcgcaatcgccgggccagcgaggcccccagctcgatccgatgccctggaattataatcttttcttgggtttgattccacatgctcgtcctaattattcttcttaagtacattctttccttgtcattaaggccaggagtggtagtgcatcgacatcaaatcccactccaaattgcttttgctaaaaacaaattaaagcccaaagagcattttattactgttcctcttcctgaattgtccttgtaggctcggcttatcatacgcacggctttcattttttcccattgatcgttggattttagatcctgcgatacaatggttttcttcaaaatctggtcgaatgtttttactgttttaattttgaattcctgaaaaccatttaaaatttcaatcaaaatctgttttcgctatacctagaaattccacagttttcgccatacctgttaccatgttaacatatcttaccttcaaaggccctggggtgtatgcagtagtagaaagtagaaaccgctaattatatcgacaagttaaaacgaattgaaagattaaatttttggcgaaaaaaatgtttggttttaatcggttttgctcggtaaccgtggtcaggggtacggtggtaactgcagagaagcagtgagcagtgccacgtgggcagcccaacacataagcgggtctctagatctctttcacaaacccaaatcccctcctttaattaatcccgtcccctcagagacgaaagcagaatcgcgttaacccccgacccgagtgtatttagcgcaatcgcaaaaggcaaaagcgaggaagaacagacaggggaacgcggaaaaagggaaaaaagaatccgtctttgcatcccacatccctgtctttctcctctcctacccttcttcttcttccacttgaagctttttctctcttggtcttatcctcctccttgttgttgcgggaagaggcaggaaggaggaggttttgtggtgcgatcttgttggggtttcaggtcagaagggagaaggggagaggtcagccatggcattgcctgtttccctcctccgcatcgcggcggttctgctcgccatcttgccattctgcgccacgcatccaagccccgggttccatgctcctcgcgagtttcacaaggcactcgtcccaggttctttcatttcccccctctgttacatgcaggaaaaatggttggtttttttatttgtttgattcagtaggattttgtggtgccctttaacctctctgaaagtctgaatcacataatggagtcgagttcttgatgtggaaatgctccccaatcccaaaatttttagtgggctgtgtggtcctcaggttattggtcatctgttccttgtctctttcttcacaatttttctttgagaaaacattgatgtgttaatgttctattttttgggggtctgggttttatgtttgctgagaaacctgtgcctgtctcagtttcttatcagcaaaaaaggggaattcctacatttggtgaaagttactgtcttgcgtttctctacgaatattgtttgttttaagtagatggtttagcatcttgtctaagcaattcatgacggaattatgtttttcaatccgctcgtatgacagtgcatcgatttttttttcactggttttctttagcaagacatatcaagcattcccctttttcagttgctgggtgccaacagtgctattcccaaattatttcagtatcacaagtgggatttgttttaaattgcctttccctgtcaagtatgtggtgcctctcgttatcccttgctccatccacaaatgatattttcagtaggttgctccttttgattcggtaggtacccgaatggtagttttgtccataattttgatttggttgccgacagttttctagttttgattagtgagtgtcaaatatcttctgtaattatctttatcttaaattgcaaatataactctactttctgttcgatgatcgtttttatcaatgtcaaataactgtaactgtaactgaaaaaagcagatagatatggatttgtggcaagaagatcaattgctgaagctcctgttgacgtaaatgtcactacaaacagttcctttgtcttggcgcaagagcgaacatatagaaaagaccccttgaatggattcaggaaatatactggcggttggaatattagcgaagtgcactatatggctgtaagaatgtttacaacctgaaattgcacctcattcatctacttgcataacaacatgtacttttttctgtttgcagtcagttggatacacagcttttccactgttcatcattgccttggtgtggtttgtgctgttttttctggttatgcttggaatttgctgcaagcattgctgttgtccacatcgcagttacacatactctcgggtagcatatgccctatctctgatacttctaatattgttcacttgtgctgcaatgtaagtactcttatatttcaaagctaatccattttcatgattccttacatttaatatatttttagctgcgtttactaacctagttccattcaatgcttacagtgttggatgtgtcatgctgtatgatggtcaaggaaagttccataaaagcacaacgactaccttgaattttgtcgttagccaggccaattttactgtcgaaaaccttaataacttatccgatagtttatctgctgcaaaaaaggttgacatagggcgatcctttttgcctaacgatgtgcaaaatcagatcaatgaaattcaaggaaagttgaactcatcagctactgagcttgctactagaactactgacaattccgagaagatacaaaaattgctaaatcaagtgtaagtatcatttattctctcaccactgcaattcctctcaatgatttggttgtgcatatgatcgtgattgcaaaacattatgtcaggcggattgctttgattatcattgcggcagtaatgcttcttctggcatttattggcttctgtaagtctttataatatttttacattgtttagagaacgattttgtccatgcaccttttttttttttttttttttttttgctaaaacacaagttgtttttatgctgacatgatgccacttgtctttaccagtactatctatctttggcctggaattcattgtctctatgtaagttaacacctctgtatgtgctaatattttttacttctcctttctttgcgctcatattataacatactatgaatcatttctgtacatcttatgcagtttggtgattatcgggtggatactagtcaccgggacgtttatcctgtgtggtgtcttccttcttctgcataagtatgtattccacttgtatcatcgtacttttgtatgttccaaacatatagctagagttagtatgtgtgcagaccttttattcatggtgctcctcttaagtgtttaatgctggctgccgagttgcaaccaaatccaaccaaccacttagccattatttttataatcaaatggtaaaaatcagattatattgttaaatctagtaacttagtttagcacagttgttgaaagttatggatgtacacacccccatcacccaaagttcgactcatcttcaactcaaattagttgtctttcttgaaaaaagataacctaaatccgagagactggtagcggccacttggctttcgaccatggttggagcatgttgcaatattcataatgtagtgcctgcatcaaggcttcgacaatttattgtgccatcatatagtatattcttgcttcattgcaatttcctattcagtgttgtcctgcttcctgttcatggctacattggtttcttactgttctgtactcaaattctacttcctacttatctatgctatcatcactgctaaatgtagatagtagatgccagtcatatgtcaattttgctgcattcctgaggtctcaaaggatcgtagtttgaaaacagaattgcaccatctagcagtagctgctatatcaactcctagttttgatgtcatatcgtgttccgcttcatgtcaatttatgcacagcacggtttttctacaatatttatattctgaaactctgtcaatattgtatgattctgttttgttagcgaaagttgcacatggttagccctctactactttcaaaaaactaggggtataattatgttttaacatgaaactcttagtaataaagctggaaagaaggaccagatcttttggaatagctccgctccctgtagattatatgagtgattgatagtagataggtagcacatgtaaatggcagtcgtggtccagtcactgatactcctattatgtacctatgattatctgaatccatatccaattttaatattattttatctcttttgtcttgtgacagtgtcgtcgcagatacttgtgtctcgatggaggagtgggttgctcatccaacagagcacacagctctggatgacattattccctgtgttgaacctgccaccgcgaatgaatccctgtatagaagtaggcaagtcacttaccaactggtgaatctggtaaaccaagtaatcaccaacgtgtccaatggaaacttccctccgcaaactcctttcttctacttcaatcagtcggggccactgatgcctacactctgcaacccgttcacagccgatctgaataaccgtacttgcaccagaggagaggttaccttggacaatgcaacccgggtaagtttctacaaccaggtgtttcgtagcctcaaattcggtgaactgttgacagcattccatctgtctatattaattatcaaatgcaggtttggaagaattttgagtgccagactaccactgtctcaggaactgagatatgcactaccgtgggccgtgttaccccaacgattctcggtcagatggcagcgggcgtgaatgtgagccaggggctgtatcagtatgggcccttcctgatccagctggaggactgcactttcgtccgcgacaccttcaccaacatcaaccagaaccactgccctggcctggagaggtacagcaaatgggtttacgtcggcctggtgatggtttcgtcggccgttatgctctccctcgtcttctgggtgatctacgccagggagcggcgccaccgtgcgtacagcaaacagcacaactacgctgacaagccgcatccgactggcccggacgcttgatgcatatggccgatgctgtgctgcagaagaatctccatgtccatactcttcgtgcctgtcatcatcatgtagatcaccgtgccttctgattgttcgttggttacaccgatcctgtcctcttctttttttttcttttttttttgttgtagcattgatgtgaattattattgtagcttgatctttttcatcttgtttgctcttcttggtgaactgaaactttgttaagaggtgctgtttgtgaacttgagatagatttctgactttgtgccattagagtttcagtttgtgtacctgctgctgttgatgtacagtcatcatggtccagaagaattgttgcattgtcattactcatcactgtatcagtttgccttacctggatagtttgcatatgtaagattttaagtgttgttgctgtgttgagccagtgtcaatcacttggtacgtagatgggcctgcggcaaccgctcttcatgcaggctgttacggcccagccatgtggacatgggccgtctatatgcgagaggcaataaggcccacgagaaaaggatctcgatcatatgcttcggcccatcacgcaaggcctactcgtggccattgcacaaggcccgtttcaattcgtcatcagatcagttggcccctaggtcataaattcagagctgcaatttgacaagatcctgcatgaattcatcgcaggagttgaaattcgagagtttggttgattccgtttcgggaaaaaagtatgcgacgccggagtcaaaccaatgcaggtattagtactacatctacatgtgtacaatgcatctggtctcacacttgccgtacgtggttggtacctgacgtggcgccacacgagctaagctgaagcatagctacttgccggaagcatctgcatttctcatcacttctgcttgctcatcacttcatcagatggagcagggaaaacacgcagcttccaggcaaattccaggggtcaactcaactcgcaagctaataaaaaaaaacactgatattagggaaagacataatatcaaataattagaaggggtgaggctcggaatctagatcgtctagcccaccaccttgtgtagctagccgaaagatccctgagagtttctctaactcgcaagctaatcaagggccaacctgagggagatttagattctgataaacaactagtgggatggaattcagctaaagagaatctgaaaaagtaaaaaaaaaagaactaacttttagcttttttttctatttttttttaaattctgtaactatagcttttatttggacaaaatgctaaactgtgaagactgaagagtaactttcaaattgtaggagaacctgcatcggccataacctcccccaaagcctaagaacgcgtgattaattagccagtaaactggggcacatgcagcatggagatcagcattgtactgctcttgcagctgactgaatccttttggtaattaattggtgctaccatacacattggccgtcagctttgacgcctggtgattcttcagcttaaattgcccttcgcccagggttgcaatgcacatgtcagcgtcgtcgtgactgggcgctgccgcggatgattaaactaatccgagtcagatccatggatgaccatcctcagacccaggcagctgcaaccttccctcttcacttcttctgctttgccatggtcaatgacgacctgaccttgacctagttgttgttacttctagtagtaccaaatgcaagcctttagccttcatcttcccacaggagagttgataacaaagtcgttaaaagttggttaaattttgccctcctgtatctgcaagacggcaactgtaacttcagttaatttgtttagttgatgaccatgtgggctagtgaaactaactgcattgattttttttttcgttagaacatggattaaaagagggatgaccacaatcacaaaaattctcgaccaaccgagcgtcgttttatataaaatttgatatatttttttctattttctttcagcgtcgtatcgctgtcgacactgaatatacttaaattgataaatgaaaaccgaccgagaatccttttcgaagcaaaagctaccgattcggaccaaaccacattgcattgataggatgatggaacggaactgtagaagttcacccttgctgggcctggaggagccgtgcactgcacctgcactgttcacagttgtccacagcagcttccatctttcctcttgcctcctcactggcggcttacggtttcttgtctggcaaaatcacccccaactctttctgcattgaacacatgatcgagatgctttgatctcgatttttttctctctctctctctgaaagttgataaggatcctagcctgcaatagcaagccacccactttaaatttctcgatttcagaaatctctctttcatacatgggctccacagcaaaaggcaaatcataaatcacaaattgacagatcaaagttgggctcgatcgagctaaacattccaagtttccaactcgccgtcagaagaaaagattctcgccgccgttccatgaacctgacacagctgagtttgacagatacagttacacatgatcatatcactgcttctcgtggatgcagaggccgggtttcttaatccattatctaaaaaaattaatcatatcactgctaaagccaccagctgcaggttgccaaatggaaatggtttacgggaggagagatggatcgatctaaattaatcatctttatttttggattgacgatgacacattccatacaagccatacaggctatgatgattacggccacgtgaacttcaggctgggagtattggagtagatagatgtatttatctacgcagaaaatgtcggtagattatcatcgcagctctctgaataatctgtgctgaaagctcggttactgaaaattcagagccaagaaactgattggaatctttgcagatctttgcaggattacgcgtaaagcgatatatctggtatcaattaggagtatcatgaaaggtatctatcttcctcttatttggattacacatcgtgtttatgaatgtgtttagatttgtacacagctaggcatgtagatacggtccaattaatctagccagatttacagcttaactgatcatcacttcagttcatacgtggggattaatcttctagaaaagatggcctttggagggatgaacgagccatctatctatcaattttgatggccttctcttttttgctgcgtgtgtgtgtctgtctaagtgtctctattctttaaatttgagacagctcgacgcttcttcgttatctgcgtaaatatcctcctgaaaaagtttcagctgttatgcctgagaaaactgctgctcaatttatttagcatagttcgttatcagctaatgacagtatatgtttaggattaaggaacaattaatttgccttcttgtcagagatagtgacgaaaatgtaaaagatcgagtaaacagcacacatcaaagtttaccatttctacaagaatccgatcacaagaattcagggctaatcagaacgcatgaattggttcacatgagatagttcagtccaagtgggaagcaagaaaattcagagtttcaaactgtggcaacagccacacgagttcttttcaaaaaattcttttctccttttgtggcttccgaaaactcgtttctttaatttcgacgatgcagtaactttcgctacagctgtggcaggagagaaaaaaatagtcgagccagatgtaaatgtccctgtccatggatatctgtctgcttgttcttggataaagatcacaagaggtaaccatcaggttaatctggcttcacatgtaagcgtgccttgttcttggccggactgtcctaagcctaattagcagaaagtctctgggaaagcgatgacctggctactaggatagtaggatcagtactatgtggtgggcccacaacatcatggccttgaatttggatagttttcagagcaaagttaagataaacattggttttggataagcttttgggaggagcatgacatctgcacttaagctgatggaatgagggaaagtactattaattgtagtaccttgttcagtttggacaactggagaaggaaaaaagttcagtttgtggtgcccatttgtgagcctgaagatggtgacctagcacatgatcccatattgatatgtagtagtactaatcttttatcttgttcagttctaccttgttaaagaattgacaaggttatcccaattcctcttggtactaatgtagattaagagttaactactctgaagaaaaatatgtagtagtatgacacaactacagacaatttgtatgcttcaagaacactgtgttcacttgtaggccaataattactgctacgttaaactaagtcatagaaagctagcagagtagtgatcgctaatcctatcctacctggcttaagagaaatttgacaaggaactgttccaagtctttgtaccaatattaaactacaccaacaggtaattgaaccacatgccataatcatggaactgatgggagtgtcttgtgacgttaagattccgaagtttcagttagctagtggagcataatattgttcagagttagtcaaatcgctgagtcagctaagttcgaactagttgtttgactgggtttttggcggcatacgaaacgaaacgagataaatcattagtgtacattagtcaagtattaattattttaaatctgaaagaatagacttatttgattttgtaagaaacttttgcatagaaagcttttacaaaacacatcgtttagtagtccagaagcgtacttataaagtacgagtaacaggaccttagcatcccactgttaagctggaacaattgaacaagatgttagaagttactgcaaaattcgaacactataatggactttcttccctaattctgtgagtgtgtgatgacaaggacgagatgcatatctttgtatttttcaggaaaaaaaatgacgggatgcatatccttgtattattcaggaaaagattccaagagatggagcacttgctctctgaaaaataatgacaaaacgttaggcacagagcctccaactcctacacaaaaggtagcctttctgactcacggccgatgcaactgatcgttaacagacaaaacaaatgtgcaataagatcagattcagattcagattaaacacactgttacattttgtgatatacgcataaggaattatttcctccgtttcacaatgtaagtcattctagtatttcctacattcatatttatgctaatgaatctagatagatatatatgtctagattcattaacatcaatataaatgtgagaaatgctacaattgcttatattctgaaacggagggaggaataccgaaacagaggctgaattttacaagctgaaagtgagctgttagctctggcaagcttcttgaactttaagagaaagatgaagaaactctgaaaaccaatcgacattcctgcgtcttcagaaaagaagtcaagcctgcgttggtttaatcagtcgttgacagaatttaatttttgaagcctaattttaaagttgattttaggggttcataaaagtctatcttttcaacatttgcttttaaagtttcaaaccgttaaaagattataaatataaatgttttatccgtaatcttttttatcatacgtttattgaagacaggtcctgtttagtacaacttcacatttcttatttatactggatttgaaatttgtatgctaaattatttataagtgaaacagaatagtttatcaaaatattattatatgatcatatattcagatccatattagatttgtaaaactaaaaacatccagcttaaagaaaatattactccatccgtaactgtatcaaacaaagtgaacggctaaaccgtagcttacacgaccctaactaaggcctggtttagttaccagcttttttttcaaactttcaacttttctatcacatcaaaactttcctacacacacaaacttccaacttttccgtctcatcatttcaatttcaattaaacttttaattttagcgtgaacaaacacaccctaaacctgaaaccaaagcctaatcttgtagcgtgtgtttgattctgggactaggtgggatgggatgataccattccagattttgggatgagatgattccattcgtatgtttgatttaaaggatggaatgaacccagttttttttgtttagtagaaggggcgaggaagggatggaatggccgccgtttgcagttaccgtcaagagagtttggtgaggtagcgcgagtcctcgtcgagcgccaccatcgcctgctctaatcggaccaatcggcagtgaccggtggccgggagagctagcacggccagcgagcaggctggctgcttgcgagagagcagcgggaggacgagcacgcggagaagaagtgacgacgctcatgccgtgcacctgatccattgctggatccgccgtcgccgagcaccccgccacccgctgccgtcgccgatcccgccgccgcttccctcgccctccccaccactggagcccgccatcgtcgccgtcgcccaagctgagcccgtcgccgttgctgtcacacgagctgtcttccaccatcacgccgagcacgcggacaataagcggcgagcagggcggcgagcacgcgagaagccgttgtgacgccgtttgctcatcccaagttggtccgtcatattttcccggatcagttggtcccggatctaagaagaatattcctctccaggaccaatccatcccactcacccctcaaccaaacacctctaaaaatgggttcatcctgttccattccatcccatcccagcaaccaaactcaaactctaccgtagagtttggttaactttggaggagaatttaggcgcaggagaaggcctcatctttccgcttatgctaatacttatccgtaaaaatttaaaattttcaaccttaaatttagagctgattttgattttttttattaaaatttattttttagtctttgcttctagatcactagaaacacatataaaagtttttattcactcttacttttcatttacggttcgcgaataaacgaaacgatggtccgtcaacgtgccactagtgattaatttacacctctcacgccttccctcgcaccacgtgctcccccatgcgaagggaagcctcgagagagaacccaacccctttcgcgcgtataaaaccaccggacccgaggcgacgccgggaagccagcccagccatcgccgccgccgccgcgctccccgccacagacatggctgctgctatcaacagcgaggcgtccatgagctcgaggcccaagctcgcgtgcctctgctcgccgaccaaccacccgggctccttccgctgcatccgccaccgcccgatcccacgcgcccgccacctctcctcttcttcttccccgccaccaccgccgccgtcgtcgtcgccgtcgtcaggcggcgtcgcgtcggccggcgccagggcgaagggggggcggtcggtccgcgcgcacctgcttcggatgatcagctgcagcaacggcggccgccgccgccgccgcggcgacttccagcctcgcccttccaggcttcgccagtgcgcctcctgacgatcaccgacgacctcttcggatcgagtgatagtacgccactatttcgcgcgtacgcatcgagtgacactagagctagggtaatcagaatcagaatcatccagggcttggctaggaagccatgtgtgatgtgctctttgcttttctactactctactagtatctgtactcctttgtgtgtttttttcctcagaggaatgaatggatcagttcaattaaattcaatcaaaatcctttgttcagttatgcgaattttactgatgcagatcaagcatgcatgcttgattttttttttcagttggttggttaatgatctcttcctcttcttttcaaaaaagaaaatctttgtttaaaaaagtgggaaaaaaatgatgggtttagctccgtggagaggcgcatgttcacaggtcggccgtgaagcttggcctgaaagcaaatgctctttatgtgtgcgtgtcagcgtctgtggctgtgagtaatttactgttcttttccgtgaagtttcgagatgattttgcccccatctttaattgattatcgtctcttgacttcacctacgcggctaagtttcccctgccttttcgctgctgctgctactttttttttattataaggaatccccattactcagttttagagaatgaaattgggttagtttcagcttgaaaatgttttgagttactttgcaattactactcgggccacttctccgcaataaagaaatgaaccagacaagtttttcatcctcattagaaaatgaaaagaaatcatgaataaatcaaagaagacaaaatgcatcatcttttcgctcatgcttatacttatcagccaaaatttgaattttcaatcttaaatttaaagttgattttgagttttttcatcaaattttatttttcaatctttacttttagatcgttaagaacacatatataaaagttttattcagataagccgcatgaataacaaaacgatggctcttaatgattcatgagatgagattatctcatctctgaattaacgtttgagggtgtgtttagttccacgttaaaattaaaagtttaaagaaattgaccgaaacgttgaagtttgtgtgtaggaaagtttaaagttgaaagttttttttaaaaaaagttgggaactaaaaagttctgagtttgagaggatctgaagacgcttggcgatcatccaagattcgaagcgtcgagatgatcgatcatgagaaagaaacggacgcgagatatgatcgatacggggatcgatcgatctgcccgtttatgcttacgtgcaagcacggcatggaacacagctcaagcctcactagatgatgcacgagatgatatgatcgatacgcatttcagcatctctctctctctcatcatccgcaacgcctgctggaaagtgtgagcaactacacgacaacgcagtttgttcgtcgtcgtcgtcgagatctgaacgcggtttgcggattccaaacattttcatacgtcatccctctagcacttgcgccaaaggtttcactctaatgcacgctagagtgcagcggctctctctgctagtggccttgtctcgaggaggtcgagattaaaagataaacagctagctagtgagaattttaaggagcgtagattttaaactctcgagggaatattcatttgttgtttaaatgatattcaaatgattatgaaaaaattaaaaagatgtatattaacatgtaatataccactacactaacttttacaagttgtaaaaaaaactataactagaaaattttgttttttcattgcaatacgtagaagttaaattttaccttaaatgtttgtagattaatctatcttgctgatttttttttaaaaaaatcgtaacaatttgagtaacatgtaaacaacgagtagagatcctctcgagagtttataataatttcccatttaaagggatgtataagagttttattgaatttctgtagctgtagattatcaaaatttgagtagaaatgttgactgttcgtgagtcgaagattttgacaaaagccgcagcggccaaaacaaaacccttcaaacatggtgtatgagtgagctgaactagagaaccgagaaccacatcgtggcccgttggattcagaatggacggttcggattcgacgacatatcagatagtgatggattaagccagctagctaattgttgggccgtggttgttaagctggcaaagatgctggccggtttggtttggtatgtcgtttgctcaatccttttcagctagttaaacttgaagagatggtagttgcattcgttttgtgcttcagaatatgctactgttaattgctgtcctgacagcaacaactctgaccagtacttaccgatcgccattaatttgcagcactgttcacttcttctccggaatcgttcacatatatacattttatttcatgttctatgctaggggactagggcaatgttttacatgttccatatatcgtctagagagattagaattcagaccagaccttaaataatactgtagtagcaaattaggttcattgattgccctgctttctgggctagctaagccttacttgttctaattaatctaagtatactgtttgcaagtcagtgacctgagcctgagggaaatggactttgtgttgcaaacacttaaaactaagtacggagtccaatccacgtacccctcccaggtgtaccaacggagaaactgtcacgttgcccaagaaattttgtcatgaaacacgctaattcaaacggaatccccgttttttcaaacatggtttgaagaattaatcagctagccgtcaatgcagcacacgattaggaattaatttgttgccccccggttgcccttgtgcagcaggcagaaacaaacaacacacaacgtgcagatccatgaacatggacacacactaaaactccattattccatgattccatcccaataatgatcttccaacaagatctaatccgagcccaatattttaaaaccgtaaaactaaaaacgcatcgaatctcttcatccaactttatgcagagcaattatctaaagaaaaaactgtctgatgacaccaatcagacacgattaattaatcaaagtcgttctcatcatgctgcttaactaatcaagcacacatggagttgtactgtggatttgcattaaaaaaaaataataattacaacagaatttacactgactcggatcactgtctggttgcctccggcccaggcaatttaactacacttttttgggcgatctttcccagtttctgttgctgcctgcctcgatcgatcaatcgcattcgcgacgataatctcgtcctacctggactaatcaagtccgtttcctcccgtaaaactcggagaaccaatcgcagcaaaaacttgctccggtttcgtactgtcaagaccgtgtcaagatctcgatcgagttaactcaaaataattcaagcccggattaattactgtatactacgctgtggtagatctgccctggtatctgggtaagctgtgtgtgtccttctaatgctaggtccatttatgcgtctgcaagatgatgatcaggtccaaattaactaactaaccaggataatgggtgattttacttggtcgtggaggttgtaatcaagttattccggctagtcaactgttgacttgccatggccccctccttgatgcagacgtcttgacattttttttttcaaccgctagctggatattcaacgggtttgttgcgtagtagtaatacagtagtactacactactactccactgtctaatgtacaccacggcactagcctttctgcaatttttttggtactcttttaatccttttttattagaatcaattgaaaaaatggtggactaaagttcggttttccattgaatacatgcatggtatcttcacgagaaattttattttatttttatatacttctcttgttgaaatgatttgcaacttgtgtcagggagtggtgctcccccctgctctataaactaggagcagcaaaactattgacaagcaacgctgggggtattttattacagcagaaatcaaacagaattgatttaagtattgttctccctcaactaacaaaacgaaagaaagaaaacactttttttttaaaaaaagccggcggccgctaactgtgtgcctgtgtgcggcgcccaccgttgcgtctcaacatctttgtgtgcaagcttccgtcagtttctacggtgattaaggccgagtttagtttcaaactatttctccaaactttcaattttttctctacacacataaatttttaactctgtcacatcgtttcaattttaattgacgtgaactaaacataacctaagattaaacacctaaagattaaactcccatgggaaaagctctgaattcaaagggcacaaacccagctaaacaacaaaaaacctcgacgggtttggtctgagtgaccgaaggtgtcacacacgggggccgcgtgatggagcaggagacggcgagacgtcatccctgctgagcttatccaaaatagatgaggatacacacaaacaaacaaacagaaaagtggatcatatgtgtgcgtaatccggagacacgtactatctccaattttttcttctcttcttatcatgaaaggcataaggattaatggatttaatccaaaaccatgggcagatttcagaatgaatgtacaagcagcacacggatccaaaactccatgttcagcttaatctcacttctcacatcactatacactacagaaaaaaaaatttctatatgtaataattcctatgtactactactatgctactagtatgtgtctcaattggttgagatgtcggcgaattggggtttatcggtggtggtggtggttgtcgccggcgcggtcgccggccatggagacggcggagaggcggctggggcgggggcggagcccggcgacgcgtctccggtgctgcgcctgctgcgcggcgggggaggggcggatggtggcggcgagagccctccgcgcccactggccgctctccacggcgccgatccgcaccagcgcgctgccgcccatccgcctcgcgccgccaagcctgacggcgccgcccgaggccggcgggctggtcggcgacggcggggaggatggcgccgccgccgccttgtggtgaacgctccgcttctgctccttgtggaggctgcaccggaacgaccccgggtggttggtcggcgagcacatgcaggagcggcggctcacggacgagacgctgacggacgcgcgtgctccgccgccggcgagcttgacgcgcgtcggggaggcggagcggtagtgcgcggcggagaggacgtgcccgctcggccgcctcgtggccgtcgccgctgccgccatgggagatcgccggagtcgggtggattggggagcagtggcgacgagaggaggagagggcggtttttgtgcttccgggttggtggttttggcaaactgagcggaaatggttttggcggttatttatagggactggttggggcagttccgtaatttactgccggttgggggtgggcccggagaactggtccgggcaggtgtcaaggaatggtggttaggtcaggttaactaactgtagttaataaagctgtgtgcgttgggccccacatgcagcacaccgaaaggctttctccaaccggtcccacattcaaggtaggattccaaacttcttgtttcattgcattcgtcccataatcgtgtatttccgtatctaatgtttaagcgtccgtcccgtttaaaaagtttataaaaagggtgtagctatatttatggcgccatatttttcatcaaaaaatagtcggcatgtatttacattgtaagttcctaaattacatatgtaattttagtgtatttacaatgtaaatctcaaaattacatatgtaagtactaaaattacatatgtaaatttgaaaattacatactaattacatatgtaagtggggtgtaaatgaggtgtaactactgtgtaagtggcggaaaaaaaatcgactatagcatattgcgccatatttctagcaactccgtataaaaattaaaaaatcacatatgaaatactattcatttttatcatctaataataaggaaaatattaataattttttaaataagatggacggtcaaatattggacacggaaaccacaattgtatttatattgggacgaaggtagtatttctcaggctgcatttcaagagaacaatagtttggcagcatacttttgttgggtcgaatttgtagagatttgaatttgatttgcacagaaacagaaacagaaacagtagtaacacgtttgcatattcagttgcgatgagtgtatgtgtgggagaccacgtgtaagattcggccggagtttgctgtacccaacggctcgattcattccagtgtgcagagcccaccgattgaatcttcttcttcttcttcttctttttctttcatccatttgcatgttgggtacatgtggatagatgcatgggtcgggtcggccagaatgagctagctactcgcgttaaaggcgggaagtgggcaaatggcctacctgacgtgacacgccaaccaaccaaccaaacgatcgatctatcgatggatcgagcccatagaattgatccagttttgtgttgccgcgcgtggaatccggcatggtagcggtccctggcatttgccagtaggatatagggccccactgtgtagtgtgactgatgctgggtgctacatccgtcccattttaaatgtaggtgtgagtttcgtattcaacgttaaaccgttcgtattaaatttataaaaaaattttaaaaaataattatatataaagtattatttatattttattatctaataataataaaaatattaatgatgaaaattttttaaataagataaatggtcaaaattgaacataaacattataaaactgtgatcttttaaagaccggggtagtactatctgtgttcattatacgtcgagatccaatttggtgtccaaggcaagctgtgtgggttttgttgtcagtagtagagaggaagggtgaggtgagacgttgcttttttatcctctttcatggggtgagtgtgtgtcagtgtgtgtggagtccgtggaaagaaagcgttgccgtacatgggcgatggctccatcgctgatgcaccgcgttctggctgttgggatcactccaacgtgcccgtctctttctaattgcgcccccctcctcctcatcgctttcacccatccttgcgttcattttgatatgatcttcttttgttttgtttttgttttttcgtttttctagactggttttgtgaatttccttttaatttggagaaaatcccctatgtacccatgaaagtttacttaatcccttctatacctctgaattttgctcaatcccttacatatccctgaattttagtttggatcccttctatgccctttccgctagttgaccgttagttgaccgttaaattcttttgaaaaagtccattttgccctttgctatgaagaaacataataaattaatgaagtatattgttggaatgtaaaaatttattggatgagactattatatttatgagtatgtgatgcaccatattatttgtgacaaatttacttttacatatgatataaaaagttaatacttatttattagttattaaaagttcttttatatagcatatgtgttttcatagtgatttgttgtattactatgaaaacacatatgctaaaaaaatcttttaataactaataaataagtattaattttttatgtcatatctaaaagtatatttatcgcaaataatatggtgcataactatttcataaacataacagtctcatataacaaatttctatgcttcaacaatatactctattaatttatatgcttctttacaccaaagggcaaaatagactttttcataagaatttaacggtcaactagcggaaagggcatggaagggatccaaacaaaaattcaggggtatgtaagagattaagcaaaatacaggggtacagaagtgattaggtgaactttcaggggtacacatgggattttctctttaatttgctggggaatccgtcaaatgaacccaggtcgcagcacccccgctacgctaacgtgacaggttagtgataactctagtacagtatatacacgtaccgtacgctgcagggagccaggagagaagacgttgcgggtgggaacgtatcctctgccatggctaatagaatggcagagagctacagtactctctgcctttcttcatttccagccgttggattgaacctggacgaaccggattggttgctacagtacccaacagtaaatcaataccgtactattaaacagtattttgcactgtttgcgcagtaaaaaaactatactaatggtagatcactgtagctcctctcacagtttactgtgcacctctgcaatttccccccaatgtcagacgatgcgaacccgttgcgggtgggttaaaagttaaaaggcactgttgcgatcatggcagcaaagtggttgttgtttttaactccacttcactgtcgcggtggatacgacacgaatatatgtactacatttatacataaacctgtatttatattggtgttaaagatatgtcctatcggttgaaagattgttgtacaataatggaacggagtgagtaagtatttccttcgacctaaatacaacgaatctctatatatcatattcttatatttatatttattgtattagaatgtattataagcccagaccggcattgccttctaaaaacatatataggacatactagtaagatcattaatttttaacctactgaaaaaactagtataaacagtttcaatccttagcatatcatgtagaagttatgtttaaaaactagtacatccgtcccattttaactcgcagccataagtttttgtgtctaatttttattatctattttatttattttttataattagtatttttttattgttattagatgataaaacatgaacatttttttataaaaaagttaaataagacgaacaattaaatttggacacggaaacttatagctgtgtttaaaatgagacggagagagtatatacataattgacatgtttttttaaatcaattctcattcaatcatcttacttctctctgtttatccacctgttcacttattttcattattaattgtttcgtgtatagagaagaaatggcttcttcatctttttttttcttttctcattaacccctttatcatctcaatcggctttttacttacatgataatatatttactgctattaaagtcagaagatgatgatgatgataataataataataataataataataataataataataataataataataataataataataataataataataattcatttccgtgcacataaaaacgatagagccggcctgttagtgttaattttccaaaatacttaatacgattcttatagcttgcacggttatttcttataggtgtaatgatttgtgagattcagttgataaataacaaaacatgagccgatcggcacaaaattcataattgattcaatcaagctataagaatctcgatccagctcgttgttatatactactacaggtagttgatactgtacatgaagtatcaagcagaactacgacagatataatgacaaaatgtcatatgattggagatacacccgtccgtatatagtatatatatatctccagcaaaggcggtttattagtagttgatcaccactataattagtgaacgggttcattatctaaatactaaaataaaaacaaatcaagtaacggagaaatggtggcgcagccacttcagaagccaggccaacgatgcgcacgagccgtgtcccaagtctagacgacacgatgccatcgcagaagacgcagatacccaaaaaaaaaacacacacacacgcccacgcagagcaccgttctgtgcgctcgctagctgtcctgtcctgcccgcccaccggccagttgcccccacgccgccacgcaccgcagcgcgacgtctcctgcatctgctgcttaaaaaaaataaaaaccgtactacgattataattaggggtggaaacgagccgagccgagcttcgtgaaagcttgctcaactacgggctcggcttggcttgattaatagaacgagcaaaaagtgcagctcggcttggttcgtttcaaagctcaagccggctcgagccagcttgtgatgtacagcaacaagtaaatactttaacaatagagcaatcaattttcagcaagtttacagcaagtacgcattatgatcaaacttatacaggtcatgtaggcatgaaataatcagtagttcggtaccaagtagcaactagcaagccaacatcaacatgcacgatcagcaagacagcaacgacatattatacatttcacaagatcacaagaccacaaattcacaatctccatacttcattcattcaggacatgtcccaacatgacacacataatcttaatagtcatgaccacaccaaaatagaagtatagagtaatagagttatagagagtacataacttagaccacattccaaaagtcaaaagtctccattctcaaattcacaagataattacagaacatctaattattatttcgcaaaatagtaaacggaaatctccacatcttcaactcctagactttctgcacacaccacagcaacatgttccacttccagccatgagccatccatttgcctacataaatgataaatcatcatgtaatcacaagcgagatagtacagaaataggaaaaaatgagtaattaaagtataacctaaaaataatagtgaagtactccatttacttactagttgctttgcactacactttgaggaaatgtaatactctcaacatcctcttcttcttctgtcgcctgaaattcagaaaaatcagaagttaattcaactactaatgtgttaagaagagaaaatgcataaattatgcatggcataatagtgagtaccgtaatcattggagcgcctctaatccagctagaagcacatatcaacgcctcacaccattgttgggcgtagagaactacgataatcacttagaactcttcccccagcactaaaagtagattctgaagacactgagctggctggtatagtcaaaaagttcttagccatcatagataccaccgggtatctatgagcattcaacttccaccacacaagtagatcaaaagctttgtttgctaagtcctcatttcgttcatcaagatataaaagcatctcagactttgatgcatcttcagaagaagattgcaaataggactgaaaattgcttgaaacagagggtagagacttgtttatgtcaaaagttgaaactgatgatgaagctctcaagctcttacctttgctagttgccatcttctccctatgatccttctcaaacttatcataaagtgtattcaattcagttcgaacttcagctaactccttttcaaattcagttggataaatcttcttaaaacaccattcaatgaatcttaacttgtaccttgggtctagaacagtagcaagcaccattgcattgtttttcacattccaatacttgtcaaatttatccaacatcgcttttcccatatttttcaaattagcatcttctgaagcacaagcatctctcaaagcaactttcacattgacaatatgggggtaaaaaatatttgcagtgggataggttgatcctgaaaatgcagtagtaacctcagccaaagacccaagtattggctcaattgatgcatacaaatcccactcttctgtgcttggcttccactcataatttaaatctgtttctgcatatgaatctaatgcttgctgatatgcaatgcaagttctcaacatgtgataagtagaactccatcttgtggtcacatcaagtttcagcccctctcccaattccattgcaagatttctacagatttctacaaacttgtgtatacgagatggagatttcttgatgtacttaacagtggaccttatgttctttgtcaaagatgccaagggtgctaagccatcattcacaattaaattaataatgtgagcacacaacaacgaacatggaagtatttagcattgtaacaacttgatcgtctagctgctagcttagcttttaaacccttgacagttgtatcattgttggaagcattgtcaagagtaattgttataaccttgtcttcaattttccattcagctagacaatcaaagatggcctgacctatgacattcccagtatgtggaggatccaactctacaaagttcagcactcggcattgcattgtccaatttttatctatgtaataggcaaccaaagccatgtagcaaaggttttgatttgatgtccacaaatcacatgttaagctaatcaattccacactcctaatactcttcatgaggttttctttctcaaaatgaaaaaccttcaagcattcacttcttatggtctttctaccaataaactgatatgaagggtttaaatacctcatcacaacattgaaccaagtatgctctaccatcctaaatgggtactcatgaacaattatcatcttagctatcagtttacgagtttcctcatggttatattcactaggagtgacaatgagagggatatctgagtcacctttctctgccgtgaagttgagaacagcttgagccctcttcttggccaactggttcaagtaaggcgtgcacttgttcatgtgcctcacaagatgtgtagtagctcccccagccttgtaagcatacaatgaatggcaatacttgcacttagcctttgtttctgtctctcctggagttaccttggaaggaactttaacctccgtgaagttattccaacaagttgaccgcttcctcccctttacagtagcaactttgggtgaaacctttagcttctttcctcttcggcgtttacccgatgaatcccctgtagaagcatcactagtaccaccagtcgctgcctcatcaccacttggcattgagtttgacatgtcatcattatgatcaaaagaattatcctttgaattatcgtcatcaatctacagttcataaacaaaacagaatttaatcaatgcatatcgacatgcaattcatttattcattttagaactaaggtcatgtagggcaagtactgtaccatggctattactggagataatggtacattgcaatctctgtatgccatatcacttgaaatagaccctataactgcgtgggaggaggcaccagtagtagagaatgcagaagcaccgacgaccttaccatccgaagcatcaattgatttggatttggatctatgaacatatttaaagatgagtcaaaattataagcaatggaaaaacaagaatgtgaagtatatgcagtaacaaagagtcgcagtttcactctcacaaatagatatatatatctaatataagatactacacaaaacacatggctcaaactatagtattggtacaacatttttgatttatttgcctgaatctttctgtgattgaatcattgacattgacacactactccactgaccacaacaatctacagctacataacatgcatcacaaaaatgagaaaatacatcatgattcacgaacctcttcatcctaggcacgtcgttgcgtgaactgtcgtcgatcggttggcaacttggcgtctcgtcgagtcagggacgccggcagcgcaggaggcaccgagctcggctcgagcggcactggggacggaggccggaggtgggcaggggagggaggcggcgccgcggtaggacgatggcacaaggggcgtcgagtccgtcgagcgtcgccggggagggaggtcggcgccggcgcagccgcagtaggggaggtaggcggcgcaggggagcgaggcggcgagcctgcagcgcagggaagggaggtggcgggttggcggcacagaggggcaagggtgttgacggcgctgccggcctggcgctgggtggctggggacagcacaggcggccaggcgcacagcgcaggggagggaggcggcggccagcaactcctcttgccagtcaccgccagtcgtcgccgctaggaaggggagggattggatactggataggcgctcggctcagggtcagggacctagggtttctctgtttcatgggccattgggccaaacaattcttaatgggctcagggacacatgatttccacaggctcgacaagcctaccgagcagcttgcgagctagctcgggctcggctcggtttggaaacgagctgtggagggagctcgggctcggctcatttagtcctcaagccgagccgagctttgcgagctcgagccaagcccgagccgagctcacgagccgagctcacgagcccgagctttttttccacccctacatgcatgttatggctgcatgtctactctttaaacaaatcataacgtgtcttctccttttttttctctcatatatctactctttaaataaactttaatcttaaaatgcaaatccaatttttattcaattacgccataaaatatatgtatctcaaaaaatcaattgtttttatcatttatagaaaattgtttcaccatttgtgcctatgtttcaattcatctcatgtgatgtttcagagaattgcaacatatgaaaaatactagttgcaacaatcataaccactagatgaaacactaaataccatcatgtgaaacataaaaaaaacatacattatatttgcaatttaaatacttgattttattaaaaaaaattaaaccacacatgaagcatagttgttgttgaaaaaaaacattcaaaagaacaccacttgtataacattttcaaataacatagtggaacattaggaaatattcattggaacatccaaataatattaggtgcaacactaagaaaatcagtcgctgaaaaataagttttgataaagtcaacggaatataatcatgtggggtcttgttataaagatttaatcgtaacaaatgtattagtgtaattagatcatggattagataaatagtttaactagaaaaatcatttgaagctaatgatttctttttctttcctttcacacagtgtgccaggttaacacctgggctagcagagcactagagttatatgggccacgagcatccgatgccatcggacgtacgacaggaagcatttccgaaattattctagagacgggccgaccgaccggcggggcggttaaatttggaaatcaaggtggcatcatcacacagcacagacgcgtctaaactggtcggcttggtttgccccatccatctcgttgcagtcgttaactggtaggggccacgtagtagtataaatattattaatatactatatattttaagattaatatttttatgtgatatctgtttaaaggactaatcctaactaaggttggttagaataaattgaaatgatagtgtgtgtgtgtgtatatatatatatatatatatcaggtattgttatcagtacaatttcttttacttatatccgtcacatgctatatctcatatctttgggaattggtttgtcggtgttgataaagaaaaaaaatattcttgtaaaagcatctactatatattgggctctatgacttagcaaaaataatatggttcttgacaaattaccatctagatcttatatacatgtactttttagggcaatatattggctcttgttttggacacagctgtaaaggtgtgatgatgacatcaaacttatgcattttgtatatcgtaacctagaaatggatggagattcacatataggcttcaataattgtatggtatttgtctagttttgttggtcattagtttgtgccgtgcttcctttttttggatgtgctattatggatttgttggtgtgagcggatttttcaaataattgcctgtggttttttaagcagaagccggaattttttttaaatatatctttagctttagcttagcttgctgtacaaaatttgaacacatcatgcatcattgtcgacactccacactaatagtacttgtacaataagatcttgaaagatctcaatttcttcctagccagctagctacacccatcgatcaatctctctcacacaaagagaaaatataaaaagaaagaacgaaaaaactccggtcattctcaagcaaagttctgtaaaatctacatttattttgtctatatacactgcgttggcgaatgtacgcacctaaattgacatgatgtacagagactagagagagagtaggataaatactactacgagtaacatttttgttcgaaaatattcaggcgaagaatgtgacggacttaatatcggatagctagccggctggtacgtacgtgtatctctttcacgtccacgtacacggtgagagcaactaatttagtgtggaaaatctgagattatttttaatttaatcgcggccgacgacgtccacgtatgtacggcacgtaattaacagcgacatggtaagacgctgggaagcatcgcggctacagtcacagggatatctcaatatccaccatggccgtgcttaaattaattcgcccaggccaagttgcataggtaaagggcatgctagcgacgtgcatgcttccttctttttttttttaaagatttttgtagtacattactacgtgatactgtattgggaaattgtgtaaacaaacatagtttgcaaaaagaatcggctccatcgtttcgcttattcgccaaacggtgtatctgcaaacaaaaaaataatttatgaataaaactgttatatacatgctcttagcgatctaaaagcaaacactaaaaaataaactacgataaaaaaccccaaattaactctaagtttaagtttgaaaatttaaattttggcttatgagtataatcataagtgaaaagatgagactgaatgtgttttggacttccctagctagtttgagttttaggaaatttcgttaaactttttacaaaaaggttccaaattagcactcattttcgcagctcccgtaaattctatatctacactctttaaaaagtaggacaggccgggtggtggccgtgaatgtatcaccccacctatttctattgtaaattttacaaattattcttcaaacttcatagtattaaaaaataataaaattcacgtataaaatcaaattaaagtgcatatattccgtatagaaaaaaaagggaaaaaaagtattgggcctgccactgccggcaaacttcggcatcacccaccgcgcagcgttgggtctccctttagaccacgcagaaactattgtagtgggccaatgcactacattgttgtgcctccctttgctagccatcctagctgggccttgggccttgggctccgaagctactcgcacgtgcagcgcgcgtgcgcgccgccagataatttccagcacacgccctctccgtgtgcttggtcctccattggttcgcaatatccatttccatttccattccactcccgatggcggcggcgctctgctccgcatccccggccatctccgccgcggcggcggcggctctcggtgcggccgcgcgccgcctgcgcgtgcgcgtgcgcgcagcctcgcggccctactgcgccgctccggctccgccacgggctgcggctgcggtgggggcacagtcctggagggcgcggcggcggtttgccgcgtcggcggcttccacgaccacggaggaggaggaggagggagcaggtgctgaggtgatgatcccgcccgacaaccgcatccccgccaccatcatcaccggcttcctcggctccgggaaggtcaggcttaaaaataataataattaagattcggctttaggtgaaaggtatccgtgattttgcactgtagagatgcttgtatactactctcccacagtgatgtcatgtgtgtacaatgtttttgctcaactagtagcgtgtgtttgcctatttactctgaatacatacggtgcttaagttcctagtatgaatttgtactacagccagaaaagtcctaaaccctcggttcctcattcttttttttttctgaaattaatccaccttgtgggtttttaaccgcacgaactagtaaaattgaaatctacatgtatgatgcttagtgaattatatgcagcatttttatattagaaaatcagtgtgccaacaagtgcgcccgctagtacacaacccgtgcggtcgttcttaaacaaccagtgcgcccataatttaagaacaagcgtgctgacatatcttcagttcgatgagttatacatactatgatgatctgtcatctctgacatcgagcggtcgttttttatttgcagacaaccttattaaatcacatcttgactgctcaccatggaaagcgtattgccgtcattgagaatgaggtactcatcttggacaacgtttttcaaccatttgttttttcttttggcaattccttgtatgttttctctgcgggagtccaagcagtaaatatttgtccattcctggaatttccgaatggtttgatagagcaaaccttattacattattgagaaataatcattagtcaataaggttggctaaaactagcaagatgaaggccacagctacaaaatcagtgcttacaccatttatgtaatgtgtctcaattgcagtatggagaagttgatattgatggttcattagttgctgcacaaactgctggagctgaggacataatgatgctaaataatgggtgcctttgctgcactgttcgtggtgatttagtccgtatgattggcgaattggttgacaagaagaaggggaagtttgaccacattataattgaaaccactggtaagaaacttaggttattgttgtagaaattatatatttgaaacaaaatcaagagagatgtgtgatatgcaatgttcacgagtatacaatttcactttgaatttcagatatttgatttgcccattttgcaatctgttctatttgtatgggcagtatttcattgtccacaattgaaatcctcagagattcatttttcaaagctactcattaattatttaattatatgaaattttcacacttgtattgtcttaactttccaggtttagcaaatccagcacccattatacagactttctatgcagaagatacagtttttaatgatgtcaagctggatggtgttgtgactttagtagatgcaaagcatgcacggctacatctggatgaagtaaagcccaagggtatagtcaatgaagcagttcaacaaattgcatatgctgacagaatcatagttaacaaggtaatggtcctgtagcaattacttgctggattgtattgatgtgtgtgcttacctagtataaatcttttcctgttatatttttccttactgttactacggtatctctaatttcttcccttgcagattgatcttgttagtgagcctgaagtatcttccttggttgagcgtattagggtcagtgcaaatgcattcattttcttctgttttactgtatggttgcttctaacttctttatttggtgcatacagagcatgaatcgcatggctcatttgaaacgagccgagtatgggaaagttgatttggattacgtgcttggaattggaggctttgatttggagaggttcctctctctctctatctgagcaaagataataccgtccttttagatgattacgtgccctagaagtgtccagttaccccctcaatggcaggaagggaagatcaaaacacaagaaagttgaatgtgctgagcctttcaaacataatgaaatgataggttgctagaagtgaaaatatacatacatagcactatatcaggcatatggtttctgctagtaatctagcattgaaaaatcaaacctgtttagtgccattgtcaatgatggctcttggacgagatgatcttagctgttcaagcacaatgaaatttacactgtgttaatttctaaaaaactagacgccactatattatgaatgacggcattgagagattaaagatctcaacaactatggctgaatatgataaagttcttaaattgtgctagtaatgaattgcacgtacattcgagtctatactgtttttcaagtttagctctggttacctgtttcaggaaaatgctgagcataagtgattcgattttgtttctgttccaggatcgagagtgcggtaactgaagtctcacatgaccaccacacagggcatgaacataaacatgaccatgaacaccatcatcacgaccatcatcaccatgaccatgaacacaaacatggtaagtatagatcctgagacatgatcatgatcacagtcatgatacacacccaattatcatgttgagaactgcaaaactgaaaggtagttgaggacaactattgaagaatacgtgacaaacctgcttgactcaataatattaagacagtgttacaacatactgaatctagattgttaagaagcatatatccatgcctgaactgtgtaggcattcttatatgtttatatgaatcattactacttgaagtttaattgctacttttctatcactacgtgaatattccaaaaagaataattgttcattttctggtacacataatatggtaacacccttttcttctttatggtagtattagcaatattacattaaaacctaaaacctcgcatcaaggagcttgataggaggtttgtgcgcacacacatcttagatccatatggtccctttatcactgtattatttcatcattagctcatgaggtttgtgtacctatccttttataagttagctcatgaaagcatttcatcattagcgggaggccaggagctccattgtattatttcactcaatttcagaaagcataatatgatgagattatcttaaatcatgacaatgctttccagattgtaagtcaaaatagattgatatcactcgaaggttttcaaactctttctaccattttaaatatgctaggtgtccatggtacgaagaacaggtaaactcattgtttttcttttccttatagaccatcatgcacacgatcacacccatgatcctggtgtttcttctgtaagcattgtttgtgaaggggagatggatcttgaaaaggttggttctaaatttatctgtcatgctctattttctcatcatcgctaaatgaaatttagaatccaaatactatcacccttttaattgccctgcacataatggggttgtggatattgaaacaagcggataacaatcttacatgcacccacaggctgacatgtggttgggaaacctactgctagaacgcagcgatgacatataccggatgaaggggctactttctgtcagtggaatgcctcagcgctttgtctttcaggtttatgttaaacttagcccgtaattttacctagtccactcttgattcttccatcgtactaatctcttactgtggtatttacacaacgaaaccaattactctgtgttatctaagaaatgtctgtgttcgttgggcagggagtgcacgacattttccagggatctcccgagagaatgtgggaaccaaatgagccacgcatcaacaagattgtattcataggcaagaatctcaatggggaagaactggagaagggcttcaaggattgcctactgaagaaataagcgagaaacgagtttgtacgtttttcctacacacgggatgggaatctccagcttcatgattttgagctttgcggctgtagaacttatccttgaatctgaagtgcgattgaatgaactaacttgcatcatttgcgagatgtacagaatgggtaaccgtaatatccttgtagccttgccatcatttacagttacgaattgtaccctgaaattgcgcacgctgtaatttgaacatacagagatggtgtttcttaattcctagtaaaatcgtaattgcatcgtggcactatggatggaatgcatgggttgattcttaattgtgtttatgaaggcggcgacattgcataggggagggtaattatgtccgtcttattcgcaacatcagcagattgaagggtcaaatgcactctcaggatgttactactccctccgtagtagctagctaggaatccctgttcattttgttcgtgatgaatctggacgaccaaagtccttacttattggtgttctacgtgatgaatctgagcagtccaggttcaagtgacaataatgatggactcaaatccagattagttaaatggacagcgtgttaacatcgtaaagagaaggattggctatatatgtagaaccaatgcataatagacatctcattatgtacacgctccaactggccagattcccagatgtccatgcagggagcaaatcattttcttaagtgcattcgaccacagcaaccagcaaaccggacataagttcaaacatgataacattaaattcgattttagaactcctcaaacggatgcaatacctatagttcttacatgtcacggtcacggtcacggtctaaagaccgatatagatactgaacgaggagcgcagtgtaagacaagaaatacatttttgagaaatcaattgaaactagggcaaacaggtccctttgacaaaccgaggcgaacctccattccgtggtgcatgtcgggagcacggaagctttcagaatcttggggcactgcaacgtgatcaatggaaaaggaagattaacacaacgataagcaacaataggacgagtaaatactagtacttgacaagaaaaaagttgtcgcaagggcggtggaactgaaatatagtctatataggctgtattttgtggtgattagtataaatcagcattaatgaatggtgatgagatgtaagttctgcatggaaagtaaagccaaaccaagctcaaagcaccgacagaagcaaaatatataatttgtggatatcatgatgacggaataaaacaaccaatttgagataattattattatttcaagtactccctccagccaaatttatttggcattgtttctaacgctgaataaatttgactagagtctagaggtagtacatcctaacaccaaaaatctatcaagatgaccctttgttttccaagaacttctaaactaccaataccaagatgccacaagactacatagttttatgttcgagaaaaacgactacacaattttgccctgttaaaagtaaacaaacaagaattcatatgaaggtaaatagaactttggtggcactccctgactccaataaagaacataaacatgaatataataaataagcaaaagttggttcccaaatagttgcaaagaaatgtgaaaagcaagcaataagattcaggggaaatcaaaggacagcaatccttacagttaagataatcttcaaacccaaaatcatctaaggaaccagtcagtgcctcatatcctagcatagatgacggcaatgcaccagggggcctttggaacctggcaacagataaatcatcaatcaaaacatctttcatgttagcctgcccaattaaaagcaatggagatgagttgtgcgtgctgtttttctcctatttgcagtgtattgatgtgctaattgttactagaaggggcagacaaacaaaaacaacatcaagatactgcgaattcaaccagaccaagggattcaagcattctgagtgatccatactagaacatacaaagcatcaacaaaatcttagtaacctgagcatattgatatgtggagatgctcaaaatactacacatgcacaatattttgagaatcaactattctaaccaggaaaattggcgtatataacaagaagtttcagaaggaatttgcacactgtcagcagaatacaactgatgaccaccaacataacatcactgatataatatgcacataggaaaagagttgcagacttgcagtaaatgcaaagagctactaccagatttacaactagacacacacacacacacacacacacacacacaaaaagctaactgcaagggcaatcttaacaaacacagggaggatataaaccacatcgaattcaaatatgcatatctcgtgcccataataagccagcccacttaagtttacggaggtgaaattcccctaacagttccaacaagacatgtaatactgcctgctcagatcagatggaactactagtgcctatctatcaacttggacagatggtggtattgcagcggaaattacatggggataggacagtgaattacttggagaggatttgggcatcaagatccttgcggatgttgaaggcggatccgtagatggcttccgcgccgaacctcttcttgtccgcccagaacttggcatcctgcgcgcgcggcggggattcagcgtgttagctagggtttcgagggcgagaggggggagaagaagaagaagaagaagaagaccttgtggacgctggcctggagcgggtgcggcggcgcgaggtcccccttgacgctgtcgttgacgccgaagcggaggacgtcgtggttcccgccgatctccttcttcaccacgccgccgctcgccatcgtcgcctgcgaagctttctctctctctctctcgcttctttctttggggagaagaaagggagacggatcatcttcgggctcgacgcactgtatattagaggcagcccatgtctgactctgactcagtttcctcttcctggtgggctgggctggtctgggctgggccggcccagcccgactgctacatggatggccaacgagatattcgtattcggcaacagttaataaaattcttggttggatttttttttttcacgcgagttgacgtgtactcacaatctacatcctatatgtagggatgaaagtggtacggataatttccgaattccgatcctgtttttcgaatacggattgctgcggtcggatttttttcggatattttcggattcggatacgaattcggatagtttttctcggatacgaattcgaatacagtagcgatggtatccgtcggaactcggattcggtcggaaactatacgacctttttttgccggatatccagaaaaaaaatcaacagccaaatccaaaataacaacatcgaaaaactcaaaaacgatcattgttgtccgccgcacgccgtcgccttgggccgccgagttcccgctgtcgccgtgatccggccaccccgaggccggcgccgccggatcccctcgtcgccgtcggccgcacgtcgtcgcctcgcgccgttgccgtcgcctcacgacctcggatcccgcggcaccggggctgccgaccacggatccggctgccccgaggccggcgtcgccgtccgccggacgccgtcgcctcgcgctgccgagttcccgccgtcaccgtgacccggccgcatcgagggccgcgtcgccggttccgctcgtcgccgtccgccgcacgtcgtcgcctcgcactgccgagcccccgccgtcgccgtcgcctcacgacctcggatcccgcggcaccagggctgccgaccacggatccggccgccccgaggccggcgtcgccgttcgccgcacgccgtcgcctcgcgccgccgagttcccgccgtcaccgtgacccggccgcaccgagggccgcgccgccggttccgctcgtcgccgtccgccgcacgtcgtcgcctcgcgccgccgagcccccgccgtcgccgtccgccgcacgcgtccccgtccccgtcgtcgccgtccgccgcacgccggccccgccaccgtggaggcgtctcgcggtcgcggcagccgggaggaagagtggcggctggactgccattgggaggtgggagttcggactagggttagccggttaggtatatatatccctccatctaaatgggctaatgggcctaagaatcagctattaagtctatatcgcgttcctccgcttcgaatttaattttatgatactaaataaactcatttgaaaaagttatcaaaaacaaagttgtacaatttattgagatctacaaattttcttttggtcatttctccatccgagtttgattgaactatataaattttaaaatttaaaatataagaaattcaaataattttttgggtagtaaatgatttcaaatggaaaaaattgtcaacaacaaagttgtataacacatcaagatcaacaacttttgtttgggtcatttttctatatgactttgtttaaacagtttgaatttgaatttcaaactatgacaccttcaaacaatattttcaaaaactaaatgatttcaactcaaaaagttatcaacaacaaagttgtataacttatcaagatctataacttttattttagtcatttcttcatctgacaaagcgatagtaacattgtttacaaaattagcatatctcgcataaggtttcataagctataagagaaatatgcaaattttgtaaacaatattactatcactttgtcggatgaagaaatgaccaaaataaaagttgtagctcttgatgagttctacaacttttatgttcatgattttttcagctgaaattatttactgcttcaaaatattatttgaacttgacattttttgaaattcaattttttttagttggtaaaacaaagtcacaagaaaatatggccaaaataatagcagtaagaacacaataactcgatagaacatgattttagaaacatttagaaaaaagaataatccaatttggagtttatatgagtgcggtaaactagttttaaattttatttttcacatacggctccttaagacacccgtatgtaaaaatgagttcatttttgcatacggaccttttaagaggcccatatggaaaaatcaatttcttaatcaaaattagctgactattgcaagaagaggaataagtttattatgcctcgctattgtcttactctcgattgaatcctctccctcaaccacaaaattggatataacaaaattattaacactaaaatttgaaaatattgatatattctattagaaaaaataatgagctatatctcttccctgatttgagaagctcggtttgaggggttgtttactttgataattatccgttaccgtatttgttccgtttcgtattcgctccgtatctgcattcgacaatattcgatttcgttttcgaatccggggtttccgattccgattccgatttcgaaaaaaaaaatgaaaacgaatatggtagagctagtttccgtccgtatccgatccattttcatccctacctatatgtagtttgcacgaatcttagaataaatatattaggtgataacaaaatgtaccatgcatgatgtttactttatatgatatttttttataagtgtaagataccttgtttatgtaatttttctatttcttatatataaaactttgaggttatcaatttggatgtgactacacagctagtaatagctggtttgtctcactccatctatgagagatcctatccacctatacttcaaataaaattttctcttaaactactcatccgatcttacgattcgattacactgttgtgttcgtaacaattaaatctttataacaagatctcacatgattatattttgatgaaaaattataaattacttttataatatatctaaattacttttagatttcactaaattacttcttagacatataaaagtaaattaatgcttccttccgcgcatccggtgcgtgccctgtgatcatgctctcttagaaaacgcaacaactagcgcaccacgatacacgtgcatctactcctagtcctactgctatgaaagagccaaagagaacacaaaaggcacgcgggtccaagttgttgtttgccagtttgtgcagcctatcaagtaaaatatcatcacaatagaataggtcgtgttatacgtgtatggcaaattaggtaacagattaatggcgctaagcttaattcatgacatgactgccatttaggctggaagtgtaacaagaaagcatattcttacaatccaccatccaaataaaaagtgaccattagatacaacggaggacatagatatttatttgaattatttaaacgcatgcacacatgccatgagaacctcatcactctctggtcataaggaacgcatctctagcaaccaaagatgacaaacatgcatataattagcctcattggtggtccatgaagctctcccagccccatatatatatatagctcctttgctatcatgtacgtagtatataacatgagcatcagggtaaggaaagtcatctcaaatccacaccagttaccctcaatagaaacggtgctaatggcccagaacaagaccatggctctgctccttgccacccttgtggcggtggttgcggtagtacgagccaccgaagagaaggatatagaagaagctgtgtgctcagagcattgcaacgacgaggaaaaagaaggcaccatcgaccacaagcactgtgtagacatctgcatcctcacgaacagggaactttttggggccttggagagaggaatgaagccctcgatggagcaattcagcgctttgtgcaatgaggggtgtagcaaagaatttaaggaggatcctgccaccaacaagaagtgcgtagacagttgcatcgtcgatgctaaggaactcaatggacacttagcgaaaggtggcgcttctagtgttcccgcacgtgcatgattgtgtcgagctgcacatctgttccttcatccatgatcgagggacgatacccattaatggttcccacccagcggtcggccttgtattacattgtcctgttgttccttttgcctcttcaattgtttcattatttggtgttcataacttctatgtgatcgatctggtctgttgttctacccaatattgttactaaaagcatttgttatctttaattgattaaaatagttccagttgtgctttgtcttttaacattcattaatatacggtctcatattccactttgagtacgtgcaatgttagtacatagatatagttcatgcttccttccgcgcgtccggtgcgtgccctgtgatcatgctctcttggaaaacgcaacaactagggcaccacgatacacgtgcatctactcctagtcctactgctatgagagagccaaagagaacacaaaaggcacgcggccacgctaaactcttccaaacaaaactaattctccgctttcaaggcacgctgcttttgaatagctacaaaccggtaccctcagtgatgatattatacatgtttctctagcgtaaaaaatatgtttcagttattgccttgacatgttgcaccaatgtgttgcatcgatgagtttacaggtatgttgtttcacgaatacaatatcgaaggttccgatttgaaaagtatagcttttaagtgcaagactgaaacaatctttttcctcgttagagaacaacaccatattaaggcaatataatacatacatttgatttcatcatttttttttaatttttgatattgggcctgacgaaaataatggatcttgttttaacaaattaagctaaacattttgtttcgcaagcctatacaaaagtttcagaaatgcgagttttagtacataatacaccattgtcgtgtgatgaccggtcaggccatgagtttttcttttggactggaagttatttaattaatcatttatagaatttatattaatgtgcaagtcatttgacatgtaaagtaaaggagggaactaaactttccttgaataaaccatgtttggagtattttcatgtgattcgccatccctaaaatattgtctgaaattttctcggaactcaacctttaattttaacgatgccaatggttacgccttttctagaactctttggccaaatagttacacggaaaggattggtgcgtctagctagacatatatgctaacatctgatggcatgtcgagacaggtgcacgcgtacagtcattccatggatcgcatacaatagctactaaatcacattagttgttgcaaagccatgacaataaaagatagagaggatgttctcccaatgacctgtagggtgaaacggagcttgagacaacaagttcttccacatatataatttttttttggggtctttcaattttcgttcgttataaatatgtaacgggaattttacttttggtatatcattactatcccccaatgttttgggactatcttcatttagaaaaatatatcgcagcccatttgagatattctacaggaccgggacgacgatctaaatctttttcttttgtcatctgagaacatttttgaaaaaaaaattaaaggcctacattagataatcacatgtctttggattagctagaacaagataatgctaacctacacattatggaaaccgaatgttcatggtactgtttagcacatcaagcaggtccaagttgttgtttgccagtttgtgcagcctatcaagtaaaatatcatcgcaatagaataggtcgtgttatacgtgtatggcaaattaggtaacagattaatggcgctaagcttaattcatgacatgactgccatttaggctggaagtgtaacaagaaagcatattcttacaatccaccatccaaataaaaagtgaccagtagatacaacggaggacatagatatttatttgaattatttaaacgcatgcacgcatgccatgagaacctcatcactctctggtcataaggaacgcatctctagcaaccaaagatgacaaacatgcatataattagcctcattggtggtccatgaagctctcccagccccatatatatatatagctcctttgctatcatgtacgtagtatataacatgagcatcagggtaaggaaagtcatctcaaatccacaccagttaccctcaatagaaacggtgctaatggcccagaacaagaccatggctctgctccttgccacccttgtggcggtggttgcggtagtacgagccaccgaagagaaggatatagaagaagctgtgtgctcagagcattgcaacgacgaggaaaaagaaggcaccatcgaccacaagcactgtgtagacatctgcatcctcacgaacagggaactttttggggccttggagagaggaatgaagccctcgatggagcaattcagcgctttgtgcaatgaggggtgtagcaaagaatttaaggaggatcctgccaccaacaagaagtgcgtagacagttgcatcgtcgatgctaaggaactcaatggacacttagcgaaaggtggcgcttctagtgttcccgcacgtgcatgattgtgtcgagctgcacatctgttccttcatccatgatcgagggacgatacccattaatggttcccacccagcggtcggccttgtattacattgtcctgttgttccttttgcctcttcaattgtttcattatttggtgttcataacttctatgtgatcgatctggtctgttgttctacccaatattgttactaaaagcatttgttatctttaattgattaaaatagttccagttgtgctttgtcttttaacattcattaatatacggtctcatattccactttgagtacgtgcaatgttagtacatagatatagttcatgcttccttccgcgcgtccggtgcgtgccctgtgatcatgctctctaggaaaacgcaacaactagggcaccacgatacacgtgcatctactcctagtcctactgctatgagagagccaaagagaacacaaaaggcaagcggccacgctaaactcttctaaacaaaactaattctccgctttcaaggcacgctgcttttgaatagctacaaaccagtaccctcagtgatgatattatacatgtttctctagcgtaaaaaatatgtttcaattattgccttgacatgttgcaccaatgtgttgcatcgatgagtttataggtatgttgtttcacgaatacaatatcgaaggttccgatttgaaaagtatagcttttaagtgcaagactgaaacaatctttttcctcgttagagaacaacaccatattaaggcaatataatacatacatttgatttcatcattttttttaatttttgatattgggcctgatgaaaataattgatcttgttttaacaaattaagctaaacattttgtttcgcaagcctatacaaaagtttcagaaatgcgagttttagtacataatacaccattgtcgtgtgatgaccggtcaggccatgagtttttcttttggactggaagttatttaattaatcatttatagaatttatattaatgtgcaagtcatttgacatgtaaagtaaaggagggaactaaactttccttgaataaaccatgtttggagtattttcatgtgattcgccatccctaaaatattgtctgaaattttctcggaactcaacctttaattttaacgatgccaatggttacgcctttttctagaactctttggccatatagttacacggaaaggattggtgcgtctagctagacatatatgctaacatctgatggcatgtcgagacaggtgcacgcgtacagtcattccatggatcgcatacaatagctactaaatcacattagttgttgcaaagccatgacaataaaagatagagaggatgttctcccaatgacctgtagggtgaaacggagcttgagacaacaagttcttccacatatataatttttttttggggtctttcaattttcgttcgttataaatatgtaacgggaattttacttttggtatatcattactatcccccaatgttctgggactatcttcatttagaaaaatatatcgcagcccatttgagatattctacaggaccgggacgacgatctaaatctttttcttttgtcatctgagaacatttttgaaaaataaattaaaggcctacattagataatcacatgtctttggattagctagaacaagataatgctaacctacacattatggaaaccgaatgttcatggtactgtttagcacatcaagcaggtccaagttgttgtttgccagtttgtgcagcctatcaagtaaaatatcatcgcaatagaataggtcgtgttatacgtgtatggcaaattaggtaacagattaatggcgctaagcttaattcatgacatgactgccatttaggctggaagtgtaacaagaaagcatattcttacaatccaccatccaaataaaaagtgaccagtagatacaacggaggacatagatatttatttgaattatttaaacgcatggtatcatgtacgtagtatataacatgatatatatatatatatatatatatatatatatatatatatatagctcctttgctatcatgtacgtattatataacatgagcatatgggtaaggaaagtcatctcaaatccacaccagttaccctcaatataaacggtgctaatggcctataactagaccatggctctgctccagtatgagcactgacattttgaccttcatgatcactggaagaaaccaggtctgtatgagggaaaagaaatcaaaccgagtctttcagaaacaaaatatagaaatttaaacaagatggaataaattacatgttttgttacacatagttgcatcaacccaagcattttgacaccatcaaacccaagcatatgtgaaaattctgctgcataatccagtgcattatcacctgctatagttttccaatccttgaagatccttcatagaaccagaaaataggattatggctgttgcagttaaaagaatttataggttgctattgcagttaaaagaagtaacacgctgaaaaatccatagaataattaatgcaattttagaggcaatataaatcccaagcatactctgattttggcattcctttgccgtaagccttttgaacctcactcccaacctgaaaataagtgttaaaatagaaattctcaatcaattaattgtggagggcctagaaagaattacaaacaacagaaaaatgtttttttgttaatttattttgacatgcaccatctctgaattaaatataccttcaaataagtggcaacagcccgtcgcaccctcgccacgccgcgccctcgtcgtgcccgccgccggctgtcggccaccgctgcttccgactgtgctcacgagataaagaggaagaggggaagaggggaaagagagaggtgagagagtatgacaggtggggccgtgactgaaagggcaagagtgacatttttcatgtccgggcctatacgtggctattttcatacagcctcttggcgtttgctatccgtttaatatgcttggcaaatgaacttgaattagtacaagtggatctctagatttgtatgtagaaggtcgagatgtttgcaaatgacatatgagttgagttgagtgatctagaatttagttcctactgtggaatatggatagctccagaaattgattttttttagtccatttattttaagctctactatttgttaagtttattctcaaaatatttaatttatagtattatccacaataattggagtgcaaaactgaccaaattaaagttgccatatgttcatctggaatctgaaagctggccttggtctgcttcattttggtgtgaccggagcccgtactcaccgttagctaccatccccaacctgccctaatctttctccaggttttgttgctagcactcgatctgtacacgctgtgggataattgcttgttgacaaggaagatcaaatcctgatggtggaagaatggcaccccctgtgcttcagctaacaatctgattagtttcctagatgcttgattattgattttatgtgtgatcattttattttgtttttgtatcagggttgcatagagtataaaagctttgtccccctatgcttgcactgagagactcttccgtagctgtcatcgcatacggtgttgcaagtatgttctctattatctccatgtgattgcacgggtagcatatgtattctcactaactgctcttacactaacaatgatgaatcagactagcagagagagtttccaagcaaatttgatggcacatgtccacgaattgtgatttttaatagtttgcattataaatgctcatcttgtcctgcctcctttttcccttaaatttatttacatggtgcggcagtcagtatcctaaacagttaaaaataggactcactaaattgaagaaaaaacaaatagctctaccttgcttatgatggtccttcatattggagcacatcttccatgggtctgtagcagctcatcctgctcaaggttgactatatatgagttttggtcagtgaaggggatgtaattagtaatggaattagaacataggtaacactcgagttaattagtgctttgcttgcagtttcaatgcttacaccacaatttcattctctgcaattacattcacattttaagcttggtcttcttccctactcccaatcaccaaactcgttttttaatgaaaacacaacttggtatttgcaagttctctatctgtttttttgcaataggaaaactgttacatgttctagacaaaaatatcatttttaagaaccgtaacaagcttatggatgaactttgacaggttccttgacgaaatttgaagatgtaacccgccacccacgtttcgcagccatcgcccattatggacttgccaagtttctggtggtgcccattgtggatgaaattactgattgcctcaagtactcaagtttcatgagtataacaaagattacagcttgggtatctgtaaagtggttatgttgagataaaggacaataatgtgagatttctgtttacatctcaaatgttccctttaatttttttacgctactttctaacttggcctttcagtttaaatctcataatatgcattgtttcttttatccaggattgaatcttctagcctctacaaaactgaattcatatttctctcctcttcattgttagtgtaaacaatactctattcaatatatgtcgacgtgtctggcacgtgcacgttaactagtgattagttgtgtactagtcgatggtactatgagcatgcagtaattagatttactcgtttcgagattggacagctacatatgctatgtataattttttttctcagtaacacagatttgtagaaaaaataaaggtatgccgcgtacttgttcttcgtatatgttccgtaaacgcagtttcgtactttagacttttccatttccgagtaatatcaggtagtcaaaatctgcaggctcaaatattactttattcaaattttattactatataataagtagtacataatacatactcactgcagtgagtaccacatatatatatatatatatattcactaggaccccttattacaattatttatgcggagaggggccagaccgccagaggaagcgaagcagcgggcgccttatttggcgcatgtggctaatgcctctttcaggcatccaggcgccggagcccagccacactggttttcgacgtggttgacgcactctttaatgtgacctgggaagtgactggctatgtaaattaatattgctttgctcagatggccaaagataaatttctcttcatcgttggcgcgatcacctaaacaaaagaagaaagaaaaagcatatatgcacaagtaaggacagtatatatatatatatatatatatatatatatatatatatatatatatatatatatatatatatatatatatatatatatgcagatgaaaagatcgatactacagtactacttaagagatgacaagatgatgtacctgtaccaccagtcccacgggcgctgcctccagcggcagcggcggccgctacctccgtcattaggagaatgacgataaaaacagcatacgcgaccttctttgagtccattgtctgactcttgttagtggctggcagtaagtacagtacgtgtgcgctcgattttgatccctcccctgcctgctgggtgcccatataaatactactactccgatccacttcacacagcgaccaacattaattgaacatgccccattaattaactagtagtacaactccacatgcccgctaggaatcagtatcttctggagtagtagtagctagctagctcccgtgtagcattaactttctgccttcaatcattttacatcattgaaggagagtttcattattttggtataagagcaagttaaatctgtacgcagttggtgcaaagagagtgacaacatgttgggtaaatttgtttaaacagttggaaattagccaggtaaataatatataacaggaataaaatttaagattgctggtgtcaatagataacatttgatgtccagaactatgtaataaattcaacattttctaaatagcctgtcattttcgttggtcaggaaaacatcttgatttgttgaccactaatttcaatataaatatattcgtaaaatagatgaaactacaatggtaccatcgaagaaatatattcaaaaatgatattaatgctcgacattgtgtaagtttcttttcctctcattagatggaggtacgaggtatatgcctatttagccaagcttccttataattttgttcaaatttgaactggtccccaatcttttttttttttgaaagaaatcatccttttcaaattccaaaggctccagtactgacctcagccattgcctatctctattgtcatgaatgccacgctgttcaccaccactgtcctgcaaaggatagacaaaattcacaaaattagcgcatttctttcataaatagcaaaagtagaccaagaattcaacactactacaaaaacagtgtcatccaccacccatcaagttaagatctaaaccattagttgtttccaccaacatttctattattgtaataactattacaagaccataagaaaggtttctcatgtttaacgcagattaagcagtctgatgtgttataccttcattcctatcaacaaagacaacattgacacataatttgctttggcgccagtacctaattaagtaggatgcgattttttttttcagtgtaatgtttatcgtctgcaattggtgatatatgggagctacaaacttgattccgagttagttatgaaggcatcattggcaaatcctaccatcgcaggtgcagtgcttttgacctgattcacaatcctgatatcgcatctagaaggcaaatcttcggactaaaaaaaagttgagccattataaatagaaacgaatggtaagtaaattcttgtttgcaatgttacatgtttgttaaaagtatcactgatccaaatacagtttaaatgtatacctgctgtcctcgcaacttaaatgcatttaagcaactacagcatcctttgtttgtgaatcatcgctccacaattattacaccagtatatcacaagtattcttttcatcctgccgtcagtcaatacgaggtcaatgtttttgaagtaccttttttaccaatcatctttgatcagaactgacctgaattgaaattttgaatgcatccatacaaccgaattggctagggcatgatagcagttagctgtttgaatatgatctggtgcttaaatttatgatctagtgcctaaaatcttaattgcagcctttaatgtgtctaatttattcaaaactgaacatgtgacacataatagaccattatattccaaatgcagttgattctcttactgattcatgtcacaaatttcaaatccatactattctagagatggagtttccatcaagaaggttatggttcttgccacgccaatcttatgaaaacaaatatatagtactaacaataaaatattcggcaaacattttttccgaatgtcagccatttacaaaattaagcatgatctcttcgtactgatttttttgtggctcaaatttgttggtattatagattaaaacaaaaatctaggtttacagaaccaatcttagcatggggttatgatcatgtttcttactatgagtggccggagtggttcatggtcttctgagttttccctgatgaccaaggatgatagcaccacgttgaagacgataggatcttatttattcttttgccttgaatagctcctgcacagcatacaatgagaatcatcgttttgtaaacttaatcagagtaagaacagcaataccaaagtgatatttgcaatgcagatgattctcaaagttcaattctcaatctccacttaaagcaacataaaaatgtactaccaaagtctatcacatcacaagttcccaaccaaaggagaaatgggaattataatacatgaataaaatatagccccaaaatcagaaagacagttttttttttttttttttttttttgaaattccaatagctcggcattcttgaaaacactataaatcagagcatggtcatttaatgcttggactatagcaaaaaatagaaatattcagagtaaatgactattaagcaaagaatgttatgatttctaatataacaaagatgggaatatgtagagaactttcgagtttcgtttttcatcaagacctcaaccaaactgctacaaaatatgtggtactaactactaaaataggagaatccttcattgataaaaaaaaatctaaaaagatattgtaggtagaagcagaattacagcaaccatgtgcttgatcttcctcacaagcaactcacagtgcttcatccacaacatttcaaagatagtagcataccactaaatagtgcctctttaatcataccaacaaatgtgatattattaccaggatcccacaacgtgatgacactgtcagctgcaaccaaaaaacagatccctcacttgaaaaagttgcgaatgtcataggtttattcctgcaattttttacttttctatgtcatcatttacatcatttgccagaaatggcaaatcattttatggcagcctaagcacgtggtatacaagtgccaacagtatatatggtatggcatccttgaccattaaatattagaggtattgtttagaggaaattaaataatcaaatcaactcacttgtatgaaccaaccaattgacatccccaaccagattgttttttttttcatcacttggttgcgaaagcatactttggacccaaacctacagattaattggtcacaagagaagcaaatgaagacctcacggcttgagccgtgttttttccagggcgggaagcaacaatagaaatagcaacattgctgtgtgaaagaactaaaccaaatgatagtaaaaacacaagaaatatattccatttgaccttataaacatgtgccaacctatgcggcaggttgaagagtacatatatagtaacaatttgagaggtagagacaaaacaaagttagaacatctaaaataaaagtccatatgcacctttcattagaggcttagagtattgaaaaaaaaaatcccaatctatcagctttcaggagatgcgatagcctgcacaacccaaagcatgacggtcaaaagacgagacaatccaatactcaggttgccttgaccaacacaagatattatttaagttcatacccttgcaacaggaagaggaacatcgatgtaccgtggccattcgccttgaccaacacaagatattatttaagttcatacccttgcaataggaagaggaacatcgatgtaccgtggccattcacatattgtctcatacatcagctcagcctgtaacatccagaacatttttatataaaaaaactctgaccaaccaacttgaagattcgttcattgctgcataacaaaatgttgtgcatgataattaccagatcatgaacagtataaatctctggtccaccaagtccgtagctctttcccatgctggtgccatcatccttgagggagttgacaatagcagcagcaacatccacaacataaacaggctgaatcctgcaaaaaccaaaaggttgcattcatgtaatctcacctgctgtggaagtttaagatgcaggtccccattgattgcctatgactgattaaaagccgtaatggcttattagtgataaaaaaagtaatttatgagtaaaacttttacatgtgtccttagtggcttaaataaaagctaatgctgaaaaagaaactacgttgtaaaagcatcaaaaccaacttcaaaatcaagttttaaaattcaaatcaagccatagggcaaatgatgaggcctgtattctctgatcaattaatgttctagactaaattttgagtcaagggattacgacaacagccaacaggaaagctcaattactttgtagaccgggaatcaatttttagcaaactgtacccatctgttcaaaatccgatcttctgtgccaatcatagttgcaggcctcataattgtagcctgttgatccatgcaacacagaagtttggttaaagtaaccgccaacataaatgggacatgtttgcttctaactttgggtagtatagaaacagaagttcagtattgcctaatgcagatgatcacctcaggaaattccttcaacacagattcttccccagcagccttggccctcagcattctagaagaagaggccgatgctcctaggcaagaaacctggataaatctcatgaaacccccatgctcctttgaaacctgtgcatagtccataacacagttaatagccagccacaaaagaagtcttgatgggaattaacacaaaagaagtgttaatagcccgctgctctaatctctcctcttttatctgctcttatctctcctcttttatcttcctcaaatatgtttatagctggcttatagtctgctactgtatctgctctaagaagagtgaaggtgtcatgtggggcgacatgtgcagcaagcagcaaagatggaagccaggcacatgcgcagcaagcagcaacaacacaatcaaggattagagatttggaaagtttttcaacaaggaaagtcttaattagggagaaataatgattatttccttgtactagggaggtcaagtgcccatataaactactagatgtggttgcgcggcgtgccgtgagagttgtcacaaatttgaataaattgatttataacttttttttacattaggtttgtactgttatcgataaatatttaagtttttctttaagttaagaattgttgctttacttgaaagatggtaatttttcatagcttttttttttgaaaatatgtataataagtatttgtttgcacgttttccaatactgaatacgcttctttatttacctttatttttactgaccaatcaatgagttgttgccggctctgtgataatcttttgaacttgagggcctcagcattctgttaggacctagcactgagtgtatagaactcgtatatgaatagttgtaaaaatgtaattataagttttaaatattgcattgataatacatagaatccaaggcgcattcctagacggatatagtattttatagacatagttaacaaatctaaaagttgtagttttgataagtagtggatgcagagtatgtgcaagaaggtgggggttaataaagatgaggtagttttttttttccacctgtagtaattgtggctatgaagtgtttgtttgcaaacaatacagtgggctgttgtggtgctaacatctttttttaattagtaattgtatgcgaatgtggaaagtgtagtgtatccgaacattattttgtaggatgtaactttactaagaaaacctacatcctaagtttcatgcatactacacacatcatatataaacttcccgtgggtctatctggcttgaatttaactcgataaattttatcaaaaggaaaataatctgatctatcttgattatttgaataaggtatgtgctctctgcatttacagatagacccattaaagaacaaggtttttttgaaaatgaactatggaaaatgcacggcctgactgaatcatttacactaaatcataagaactgtgatccgttcaatgcagaacttcctttctcaattagaatttagctatgttcttgacaaactgcaatataaattatccgaaggtacacaactggtgtttattatattaagagcaaatatgcacatctgccatggcattacttatggagtcttgaatggactctagtgttactgatcccagggcttataatcgtcacagtaggatacttcagcagatgagctgaccttctcttggcaatctgctccacagttgtcaaagaaccaatcaaaatgtaatttcaaccaagacagagagaaaggagagagaggaaatgacgggtgataagctcagggtgattcttcagagtgctagtagcagccagagatgaagtacaaagcagtagaacatctctttctgttgattattcagagcagcagggtaaaaagtgaaactggattaggacacattcctacttcagaaaagataggtgaagagaatatttgctgtacattcttccgtgataatttcagtttgaaagtggatggaggcacaatttaacctttgcagcatacaactcagaatagcacagtacgatgcttcactggaatgattaatttatattttgaactcatgaaacagtaaaaattgaagtactccaacacatttaaccagtctgaaccaaaatagtacacagagtagaaatcaggaaccatggtttgcagagcaataaagcatgaaaattcagcaaatatactgaatatttcaacattggcacaataacaactaacttcaaggagacaaggactcaaggaataatccctgcaagtatgttcaactgataggacatatacatttctggaatgtaaatgaactaaatttgtttggcaaaatgaatttgtcagtaacattttagagcactgctgagtgggaaaagcattcagctgatcactctgactaattatgtgggcaaaaagcaatttgagaagatggtgacggctaaacttattatcttaattcggattggtatttttttagctatcataggtggttttgtttagaggtgtggacagaaggtagcaaaatttctttgggaggcggacttaacaaagtgtagtctgttgatttacgtgaaaggatttatcaagagttaatattgtgacaaaccaaatctgggttcgtgataattaagacagttaatggagcaaatcattttagaatgattcgttgtcagattgtaaatcatgatatgtgtcactaaaataatctagactcacaacatgtaagtatgtgactgcactaccacacatccttgcacacagagtgagaattaattagtagagtggtagagcatatataattaaaatgacaggcttgagaaaaggtggtgcaaatcaacagggaaaaaattgaattaggagcaaacctgacttctttatcaaatccaaaatgagccccaaagtaaaatgccacacagtatccatgaatcactacggacagctatcagggacaaccaatctttccaagaacgtgcaaagaatagattggaaaatcacaggtatgcctgaaggatcaagtaacttttcatctcgttgtttgccacaagatacatcttgttcaccaaatgagttgcatataaaataattgcatcattgaattttgctcagtggtacgaattatctgcaatgattaagtgaagaagataactgctcagagtttccctggtacaattaaaaaatacgaacaccagtatgaaatacaaagctgctggattgttgcaaaaataacatgaataataacaaaacaggaaaatggaaaacaaattagcgtatgtaggaattgcatagttagcaattaaaaaacagatttctagtgtttgtccataccgtgaaagatattatctccaattgttcaacaataaagggaactaaaccgataggggattatgtaatccaaataaacctgtgatgaaaccgaaggagctagttcagcgaaatgtagtagttaatctgctagtccaaatattgttgtatcggaaagaaggagcagattcggatactgaaatctgttgaaaattgataactgggccacaaagaaatctgcaataatcacaataatgattggaaagagaattagctcgattggggacaaagtgacgaacctgcactaggaataatggagatctagtggaacaacgtcctagttagccgagaggatggatccagcaatttcttcatatatagaaatgacgaggattgggcctggctgcatagacagcagaggcatatgccaccagcccgtactgcatcagtgccaattcagcgaagaagaaggccatgtgctccatcagcattcaccaaaagaaatcttgagtacacgcttaaacttgtcgcttagcaatgaaatataatctggtggtaaacagaaacaaacaaaagccatggctctttacctccttgtcacttttgttatctgcagacgcagatagcatcataatgaagacatatggtgtaggaatggtgagattccactgaagcttattcagaatccccttctccattgcaagaatctgttccctagtgtatgcactatctgatatgaagatgaagtcgttcacctgcaaatacatacacagagatccaatcagaacaagtccctgctagaaatggacagtgcagagcaaaggggataaaatgttgctacctctggggcccaaatctcctcgtacttgcaatctatcagcatggcagaaacggcgaccagttgcagctccctccgctgcacttgctgcatcgagagagagatttgtggcgcacttgtcgcttgtgtgtaggcggtgccgccgagcagcaattccagagctccacgtcccaggacccagccatcctcggaggccgcagcgtctcaaatagcattgaggtagaccacgaggaacttagacagccggtcgtattccttctccctctccgccaccatcgccctcgactcgctgttcgcagcagcggcctccctcgccggctgcttcttggtgcttgaatccttatttttcttcttctttataagtaacaataggacgagtaaatacttgacaagaaaaaagttgtcgcaagggcggtggaactgaaatatagtctatatcggctgtattttgtggtgattagtataaatcagcattaatgaatggtgatgagatgtaagttctgcatggaaagtaaagccaaaccaagctcaaagcaccgacagaagcaaaatatataatttgtggatatcatgatgacggaataaaacaaccaatttgagataattattattatttcaagtactccctccagccaaatttatttggcattgtttctaacgccgaataaatttgactagagtctagaggtagtacatcctaacaccaaaaatctatcaagatgaccctttgttttccaagaacttctaaactaccaataccaagatgccacaagactacatagttttatgttcgagaaaaacgactacacaattttgccctgttaaaagtaaacaaacaagaattcatatgaaggtaaatagaactttggtggcactccctgactccaataaagaacataaacatgaatataataaataagcaaaagttggttcccaaatagttgcaaagaaatgtgaaaagcaagcaataagattcaggggaaatcaaaggacagcaatccttacagttaagataatcttcaaacccaaaatcatctaaggaaccagtcagtgcctcatatcctagcatagatgacggcaatgcaccagggggcctttggaacctggcaacagataaatcatcaatcaaaacatctttcatgttagcctgcccaattaaaagcaatggagatgagttgtgcgtgctgtttttctcctatttgcagtgtattgatgtgctaattgttactagaaggggcagacaaacaaaaacaacatcaagatactgtgaattcaaccagaccaagggattcaagcattctgagtgatccatactagaacatacaaagcatcaacaaaatcttagtaacctgagcatatcgatatgtggagatgctcaaaatactacacatgcacaatattttgagaatcaactattctaaccaggaaaattggcgtatataacaagaagtttcagaaggaatttgcacactgtcagcagaatacaactgatgaccaccaacaataacatcactgatataatacgcacataggaaaagagttgcagacttgcagtaaatgcaaagagctactaccagatttacaactagacacacacacacacacacaaaaaaaaaaaaaaaacgagctaactgcaagggcaatcttaacaaacacagggaggatataaaccacatcgaattcaaatatgcatatctcgtgcccataataagccagcccacttaagtttacggacctaacagttccaacaagacatgtaatactgcctgctcagatggaactactagtgcctatctatcaacttggacagatggtggtattgcagcggaaattacatggggataggacagtgaattacttggagaggatttgggcatcaagatccttgcggatgttgaaggcggatccgtagatggcttccgcgccgaacctcttcttgtccgcccagaacttggcctcctgcgcgcgcggcggggattcagcgtgttagctagggtttcgagggcgagagggggggagaagaagaagaagaagaagaagaagaagaagaagaagaccttgtggacgctggcctggagcgggtgcggcggcgcgaggtcccccttgacgctgtcgttgacgccgaagcggacgacgtcgtggttcccgccgatctccttcttcaccacgccgccgctcgccatcgtcgcctgcgaagctctctctctctctctctctctcttcactcatcactcattctttcattactcatggaacggtccagatcatctctgtgtaaaatccaacgctcaggatcgtctccacctctccaccgcgccctcctctccgccccctttctctcgctctcacgcgtccccgcccctccccaaccgcgcgccgctccccaaccctaatctctccctctcacgcggcgccaccgccgtcgtcgccgccctcgactgccgctgctccgccgtcgtcgcatccgtcgtctcgccgccaccgatccccgcgccaccaccatcgccgccgccctcgactgccgccactccgccgtcacccatcgtcgcatccgtcgtcgccgccgccctcgactgccgccgctccgccgtcgtcgccgccaccctcgactgccgccgctccgccttcgtcgcatccgtcgtctcgccgccaccgatccccgccgccggctcgccctcaaccaatccccatcaccgtcgtcgcatccgtcgtcgtccaggatttacgtcaccgttccgtcaccgcacccacacgatgatccccggcgacggaacgggtcatggtggccagggaggatactcgggcccgacgagctcccggcgtctcaggtaatgtcgccgaagacaagaactccggtcaagctcctcggccgtgaggacgcaagcgtgtgagggtaccccttttccctcaaatttaattatgtactctgttacttagttctataattcatctgctcggttagtgtcccatcacaatcgcttggtcaggattgaatgttctgtggattggattgggagttgtttgctcaaggagcaattagggaatattttagttggttgcggctgcaaataccatcagaacaacaatggagtatttaacaagagccaacagccttttgtttcagatgaattccctctgaagtcacccgtcaattgactaatgttagacaatctaccatctagaggagatcattcctgaacccaatatggtgataagccgcctctgttgatgtgttacactcattgttacttgttctgaggtgtacaccttgcttgctatattggaagagtgaatttaattcacatggatataatattttgcaatttttgcatatgaaattatatgcatgttcttgtgatgtgagaaggttaaattcctttgtgggatgcccatttaatttctggttgctaattttactgaagaatgagagtaggttatgatgtcttgggttttgataagtagggtgtaaatttatatagtacaataaacatgcgtgctggtcattctgttatgttggattgaaacaagtgatgctggcaattcaggtgcagaccagcttttggttctgtaaattattttctcaatttaaatagatcatgtattgtgatgatgtgaatacaatattatgatgttatcatgtgttcaacagagcttaaaaaatactcacaaactggattctcgtagttatacagtttaaataagttataagcacgatttgggtttgatgtcttccatttgatttttggcgctcctccctcttgctccgatctggccttagtgatgccgccctgttttcgcggttgaccccggcaccagccccttcctctggccacgtgcgagttcgagattccaagtcccggtggtcggatttctcaaccccggcactggcctcgcacaggctgcgatccgctcgccaacaaggtaagtcgttattgggatgtttatatctgaaaatttagataatttcttttgaacttcattgcttggtcaacaacataacccaggaaaccaattaaattgatagacatgttgtgtgctctcttaagagatcaacatccaaattgacatccaagttaaaagaagaattttattatctaaatcatgatgccaatattgagagtttcttttactttccgttgtatacagtttctgtgatgtgtaccgaaggttatatacataatgagattttacttcaatggtggaattgtgctctattaaaccacatggaaagttctgatttgtgcagtgataatttttccctttaaaaagtcaaatttggtttacatttttattcatgacacctgaatatgtaaaatgccatgcattagtaatgtgcaagcactttcaatgtattgtctaaactctaaaggaacaacttaccagtttattagtgaatttatgaaaaaaaatcagatgtttaatgtctgaataaattcagattctcttctctgcttcatgccttcatcaggatgaggtagttagtgttgtactgtagttgacaaatcgatttgttcgcatcgtgataaggcgcagaaggtaaggcggaaattgccttggtttatcctctccccctaaatttcctctgctgcgattggttgattggttaatgaaaaacccgatacttgcaagcagattctgattagattctaattattgggattttctagagttagtttaaggaaaagtgagttaattatcgacgatgaaatatacacttccatgattagaattatatatcgaatagacaaatatgtgtatgtattaaaaatatctgacaaaatggactgtatgattataatgcctttcaaccattgctttgtgcaatgctcattatatctcccggaaattaattgatttctgcttttgtaccatgtgcgatgtttacttttaaactgctcaggttcattctatcttattttctggtgcttctgaagcgatgtatatttcttcatttttaaactgctcaggttcatgaaatcaggcgatgactacctgccacaatgcgaagacagacggtcagccgcctacacaataggctcctacactgccaccatcactgaatgcacatctggtcctcccttattttcgttggtatgtagtatgtacgtaagaactaacaagtttattcattcaaagaaaaactaacaagtttatgttaagcttcctttttaataatattttacattactgatatttagtgcagtgaaaaatgctgcaaatctctgatatttagtgcagtgcaaaaatgatacatagcttgattggatgctctttctcattatggccgactgcctgatggaattttttccatgtgaaaacaaatgtttactctgtttcaggcttgtgtagagaagaaaaggtggaattgtggaaggtaatcgcggggagttttggttcattttttgaagatttctctaattggtacgtactaattaaccaattggagttttggtctcgttactcactgtaaaaacatgatggtaaaaaaacagtttaatcctattggtactcttttatcccattgaacattttgtcgttgtgtcattgactgctatcaaaaaggaaaaacagtggatgactctttcaggaaatataggatagccccattgatggcacattttgaaccgttcatgatccctgatttattctcttgaccatattctgcactgctatacttgctaagtaatacaaatatatttatatccctgtagcatgtgagttactctataagacaattattatttttacataactaattaacatttttactaaactcttttattttgacaatcactctaagacgtatgcaattgcgtcttacgaaagcaagtgaccctgagagcactgatctttgtaaagatgcacacagcttactgcaggagaggataacaaaatagaagtctataaaaatctatagaagggatcaaatatgcttgactgaatgatagagatggaaaaatgaagaagtgatgactgttgtttcacaatgtattcatttcatctatcctataattgtagtggtgtgtcaatgtgtgatacttctagatttttccagctccattttgccagctccgtgtgtgttaatgattcagaaatcgtggaattgcttggaacatgtactttattctcaaccattttttgtggaagtgtggatgtacattgtctaatatattggtattgaagtgattaaatatgattattgatggttttgaattaatattttagataatataatatcactgtactttgccttaatatctgacctagatcaaaataaagctcaattgggtggattctaggaaacatatttttactactccctccatttcacattatgtgtctagattcattaacatctatatgaatgtgggcaatgctagaaagtcctataatatgaaacggaggaagtaacgtgtaattagacggatcatattcgggctcgatgcactgtatattagaggcagcccatgtctgactctgactcagtttcctcttcctggtgggctggtctaggctgggccggcccagcccgactgctgcatggatggccaacgagatattcgtattcggcaacagttaataaaattcttagttggattttttttttcacgcgagttcacatgtcctcacaatctatctacatactatatgtagtttgcacgaatattagggcagatatattaggtgataacaaaatgtaccatgcatgatgtttactttatatgatttttttttataagtgtaagataccttgtttatgtaatttttctatttcttatatatataaaactttgaggttatcaatttggacgtgactacacaactagtggtaactggtttgtctcactccatctatgagagatcctatccacctatacttcaaataaaattttctcttaaactactcatccgatctacgattcgattacaccgttgtgttcgtaacaattaaatctttataacaagatctcacgtgattatattttgatgaaaaattgtaaattacttttataatatatctaaattacttttagatttcactaaattacttcttagacgtataaaagtaaattaataaaaaataaaagtaatttacatatattatagagtaacttataaaaagaagtagctttaatgcatgccttttttcaatggacgtgactacatagctagtggtagccactccatctagtgtctcctttcaacttgaaaaatacgatagtgtgtcttttttaacctctttaataacttatatattttaaatcacatattgttttgaaaatctatttgcaccattgtgctccacttaaaatatgcgataaaacaagatccatattaaatatattcaaatattttattaatttaaaagtaagttattacatgttaggaagtaacttccatgttatcaggaagtaacttttacatcttatacatgattaattctcattagttactccatcaatgttatttacaatccatcaaatgttttatcttcttttcttgtactacatgaaaaacaaaagtgaaagggaaaaaacaagagagaatgcactcagtactactgagtttgtcacccttctacaatctaccactgacattgtaaagttctataatataccaccgtgttttgttcaacctctactatgtgccatcactgtctagttaacctctgttagagctctaaaaagacctatttgcccctagcccattctacaggcatggctacctccttgttgtcataaggaaggccagctccttgctggcggtgggcgaccggttgcagcggcgctggggacgacggttgcagtggcgtcggggacgacagtgatggggatggaagcgctaggacaccggaagtggaggggcggtgggcggttggacgaggcagcggtgctgcgagcaacgaagccaggacgccggcggtggaggtgtggttggtagagaatggggagggcggcggcgctgcgggcgacggcgccaatacgccgacggtgaaggcgtggtgggcaaaggacggggagggcgctggcgctgcgggcgacggggagggcggcggcgctgcagatgacggggagggtggcagcactgtgggcgatgacgccaggacgccgacggtggaggcatggtgagcagaggaaggggagggcggcggcgccaggatgccggcggtggtggcgtggtggtgaacgacggggaggacggcggcgcggcgggcgacggggccaggatgtccgcggtggaggcctagtgggcggacaaagggaagggcggcggcgctgcgggcgacagcgccaagatgctggcggtggaggcatggtgggcggcggcgccaggatgccggcggtggagtcgtggtggctggatgacggggagggcggcgcctggtcggcggcggtgaggatttaggaaatttgggctagggttttagtcaattaatcaaagggcatttcaggcattaagagaaaaatcaacgctccaaacggagggcaactaacggtttgctgatggtgatggtacgcagtagagattgaacaaaacacgatggtgtgatgaccggtcaggccatgagtttttcttttggactggaagttatttaattaatcatttatagaatttatattaatgtgcaagtcatttgacatgtaaagtaaaggagggaactaaactttccttgaataaaccatgtttggagtattttcatgtgattcgccatccctaaaatattgtctgaaattttctcggaactcaacctttaattttaacgatgccaatggttacgccttttctagaactctttggccatatagttacacggaaaggattggtgcttctagctagacatatatgctaacatctgatggcatgtcgagacaggtgcacgcgtacagtcattccatggatcgcatacaatagctactaaatcacattagttgttgcaaagccatgacaataaaagatagagaggatgttctcccaatgacctgtagggtgaaacggagcttgagacaacaagttcttccacatatataatttttttttggggtctttcaattttcgttcgttataaatatgtaacgggaattttacttttggtatatcattactatcccccaatgttctgggactatcttcatttagaaaaatatatcgcagcccatttgagatattctacaggaccgggacgacgatctaaatctttttcttttgtcatctgagaacatttttgaaaaaaaaattaaaggcctacattagataatcacatgtctttggattagctagaacaagataatgctaacctacacattatggaaaccgaatgttcatggtactgtttagcacatcaagcaggtccaagttgttgtttgccagtttgtgcagcctatcaagtaaaatatcatcgcaatagaataggtcgtgttatacgtgtatggcaaattaggtaacagattaatggcgctaagcttaattcatgacatgactgccatttaggctggaagtgtaacaagaaagcatattcttacaatccaccatccaaataaaaagtgaccagtagatacaacggaggacatagatatttatttgaattatttaaacgcatgcacgcatgccatgagaacctcatcactctctggtcataaggaacgcatctctagcaaccaaagatgacaaacatgcatataattagcctcattggtggtccatgaagctctcccagccccatatatatatatatagctcctttgctatcatgtacgtagtatataacatgagcatcagggtaaggaaagtcatctcaaatccacaccagttaccctcaatagaaacggtgctaatggcccagaacaagaccatggctctgctccttgccacccttgtggcggtggttgcggtagtacgagccaccgaagagaaggatatagaagaagctgtgtgctcagagcattgcaacgacgaggaaaaagaaggcaccatcgaccacaagcactgtgtagacatctgcatcctcacgaacagggaactttttggggccttggagagaggaatgaagccctcgatggagcaattcagcgctttgtgcaatgaggggtgtagcaaagaatttaaggaggatcctgccaccaacaagaagtgcgtagacagttgcatcgtcgatgctaaggaactcaatggacacttagcgaaaggtggcgcttctagtgttcccgcacgtgcatgattgtgtcgagctgcacatctgttccttcatccatgatcgagggacgatacccattaatggttcccacccagcggtcggccttgtattacattgtcctgttgttccttttgcctcttcaattgtttcattatttggtgttcataacttctatgtgatcgatctggtctgttgttctacccaatattgttactaaaagcatttgttatctttaattgattaaaatagttccagttgtgctttgtcttttaacattcggtctcatattccactttgagtacgtgcaatgttagtacatagatatagttcatgcttccttccgcgcgtccggtgcgtgccctgtgatcatgctctcttggaaaacgcaacaactagggcaccacgatacacgtgcatctactcctagtcctactgctatgacagagccaaagagaacacaaaaggcacgcggccacgctaaactcttccaaacaaaactaattctccgctttcaaggcacgctgcttttgaatagctacaaaccggtaccctcagtgatgatattatacatgtttctctagcgtaaaaaatatgtttcagttattgccttgacatgttgcaccaatgtgttgcatcgatgagtttacaggtatgttgtttcacgaatacaatatcgaaggttccgatttgaaaagtatagcttttaagtgcaagactgaaacaatctttttcctcgttagagaacaacaccatattaaggcaatataatacatacatttgatttcatcattttttttaatttttgatattgggcctgacgaaaataatggatcttgttttaacaaattaagctaaacattttgtttcgcaagcctatacaaaagtttcagaaatgcgagttttagtacataatacaccattgtcgtgtgatgaccggtcaggccatgagtttttcttttggactggaagttatttaattaatcatttatagaatttatattaatgtgcaagtcatttgacatgtaaagtaaaggagggaactaaactttccttgaataaaccatgtttggagtattttcatgtgattcgccatccctaaaatattgtctgaaattttctcggaactcaacctttaattttaacgatgccaatggttacgccttttctagaactctttggccatatagttacacggaaaggattggtgcgtctagctagacatatatgctaacatctgatggcatgtcgagacaggtgcacgcgtacagtcattccatggatcgcatacaatagctactaaatcacattagttgttgcaaagccatgacaataaaagatagagaggatgttctcccaatgacctgtagggtgaaacggagcttgagacaacaagttcttccacatatataatttttttttggggtctttcaattttcgttcgttataaatatgtaacgggaattttacttttggtatatcattactatcccccaatgttctgggactatcttcatttagaaaaatatatcgcagcccatttgagatattctacaggaccgggacgacgatctaaatctttttcttttgtcatctgagaacatttttgaaaaaaaaattaaaggcctacattagataatcacatgtctttggattagctagaacaagataatgctaacctacacattatggaaaccgaatgttcatggtactgtttagcacatcaagcaggtccaagttgttgtttgccagtttgtgcagcctatcaagtaaaatatcatcgcaatagaataggtcgtgttatacgtgtatggcaaattaggtaacagattaatggcgctaagcttaattcatgacatgactgccatttaggctggaagtgtaacaagaaagcatattcttacaatccaccatccaaataaaaagtgaccagtagatacaacggaggacatagatatttatttgaattatttaaacgcatggtatcatgtacgtagtatataacatgatatatatatatatatatatatatatatatatacatatatatatatatatatatatatatagctcctttgctatcatgtacgtattatataacatgagcatatgggtaaggaaagtcatctcaaatccacaccagttaccctcaatataaacggtgctaatggcctataactagaccatggctctgctccagtatgagcactgacattttgaccttcatgatcactggaagaaaccaggtctgtatgagggaaaagaaatcaaaccgagtctttcagaaacaaaatatagaaatttaaacaagatggaataaattacatgttttgttacacatagttgcatcaacccaagcattttgacaccatcaaacccaagcatatgtgaaaattctgctgcataatccagtgcattatcacctgctatagttttccaatccttgaagatccttcatagaaccagaaaataggattatggctgttgcagttaaaagaatttataggttgctattgcagttaaaagaagtaacacactgaaaaatccatagaataattaatgcaattttagaggcaatataaatcccaagcatactctgattttggcattcctttgccgtaagccttttgaacctcactcccaacctgaaaataagtgttaaaatagaaattctcaatcaattaattgtggagggcctagaaagaattacaaacaacagaaaaatgtttttttgttaatttattttgacatgcaccatctctgaattaaatataccttcaaataagtggcaacagcccgtcgcaccctcgccacgccgcgccctcgtcgtgcccgccgccggctgtcggccaccgctgcttccgactgtgctcacgagataaagaggaagaggggaagaggggaaagagagaggtgagagagtatgacaggtggggccgtgactgaaagggcaagagtgacatttttcatgtccgggcctatacgtggctattttcatacagcctcttggcgtttgctatccgtttaatatgcttggcaaatgaacttgaattagtacaagtggatctctagatttgtatgtagaaggtcgagatgtttgcaaatgacatatgagttgagttgagtgatctagaatttagttcctactgtggaatatggatagctccagaaattgattttttttagtccatttattttaagctctactatttgttaagtttattctcaaaatatttaatttatagtattatccacaataattggagtgcaaaactgaccaaattaaagttgccatatgttcatctggaatctgaaagctggccttggtctgcttcattttggtgtgaccggagcccgtactcaccgttagctaccatccccaacctgccctaatctttctccaggttttgttgctagcactcgatctgtacacgctgtgggataattgcttgttgacaaggaagatcaaatcctgatggtggaagaatggcaccccctgtgcttcagctaacaatctgattagtttcctagatgcttgattattgattttatgtgtgatcattttattttgtttttgtatcagggttgcatagagtataaaagctttgtccccctatgcttgcactgagagactcttccgtagctgtcatcgcatacggtgttgcaagtatgttctctattatctccatgtgattgcacgggtagcatatgtattctcactaactgctcttacactaacaatgatgaatcagactagcagagagagtttccaagcaaatttgatggcacatgtccacgaattgtgatttttaatagtttgcattataaatgctcatcttgtcctgcctcctttttcccttaaatttatttacatggtgcggcagtcagtatcctaaacagttaaaaataggactcactaaattgaagaaaaaacaaatagctctaccttgcttatgatggtccttcatattggagcacatcttccatgggtctgtagcagctcatcctgctcaaggttgactatatatgagttttggtcagtgaaggggatgtaattagtaatggaattagaacataggtaacactcgagttaattagtgctttgcttgcagtttcaatgcttacaccacaatttcattctctgcaattacattcacattttaagcttggtcttcttccctactcccaatcaccaaactcgttttttaatgaaaacacaacttggtatttgcaagttctctatctgtttttttgcaataggaaaactgttacatgttctagacaaaaatatcatttttaagaaccgtaacaagcttatggatgaactttgacaggttccttgacgaaatttgaagatgtaacccgccacccacgtttcgcagccatcgcccattatggacttgccaagtttctggtggtgcccattgtggatgaaattactgattgcctcaagtactcaagtttcatgagtataacaaagattacagcttgggtatctgtaaagtggttatgttgagataaaggacaataatgtgagatttctgtttacatctcaaatgttccctttaatttttttacgctactttctaacttggcctttcagtttaaatctcataatatgcattgtttcttttatccaggattgaatcttctagcctctacaaaactgaattcatatttctctcctcttcattgttagtgtaaacaatactctattcaatatatgtcgacgtgtctggcacgtgcacgttaactagtgattagttgtgtactagtcgatggtactatgagcatgcagtaattagatttactcgtttcgagattggacagctacatatgctatgtataattttttttctcagtaacacagatttgtagaaaaaataaaggtatgccgcgtacttgttcttcgtatatgttccgtaaacgcagtttcgtactttagacttttccatttccgagtaatatcaggtagtcaaaatctgcaggctcaaatattactttattcaaattttattactatataataagtagtacataatacatactcactgcagtgagtaccacatatatatatatatatatattcactaggaccccttattacaattatttatgcggagaggggccagaccgccagaggaagcgaagcagcgggcgccttatttggcgcatgtggctaatgcctctttcaggcatccaggcgccggagcccagccacactggttttcgacgtggttgacgcactctttaatgtgacctgggaagtgactggctatgtaaattaatattgctttgctcagatggccaaagataaatttctcttcatcgttggcgcgatcacctaaacaaaagaagaaagaaaaagcatatatgcacaagtaaggacagtatatatatatatatatatatatatatatatatatatatatatatatatatatatatatatatatatatatatatatatatatatatgcagatgaaaagatcgatactacagtactacttaagagatgacaagatgatgtacctgtaccaccagtcccacgggcgctgcctccagcggcagcggcggccgctacctccgtcattaggagaatgacgataaaaacagcatacgcgaccttctttgagtccattgtctgactcttgttagtggctggcagtaagtacagtacgtgtgcgctcgattttgatccctcccctgcctgctgggtgcccatataaatactactactccgatccacttcacacagcgaccaacattaattgaacatgccccattaattaactagtagtacaactccacatgcccgctaggaatcagtatcttctggagtagtagtagctagctagctcccgtgtagcattaactttctgccttcaatcattttacatcattgaaggagagtttcattattttggtataagagcaagttaaatctgtacgcagttggtgcaaagagagtgacaacatgttgggtaaatttgtttaaacagttggaaattagccaggtaaataatatataacaggaataaaatttaagattgctggtgtcaatagataacatttgatgtccagaactatgtaataaattcaacattttctaaatagcctgtcattttcgttggtcaggaaaacatcttgatttgttgaccactaatttcaatataaatatattcgtaaaatagatgaaactacaatggtaccatcgaagaaatatattcaaaaatgatattaatgctcgacattgtgtaagtttcttttcctctcattagatggaggtacgaggtatatgcctatttagccaagcttccttataattttgttcaaatttgaactggtccccaatcttttttttttttgaaagaaatcatccttttcaaattccaaaggctccagtactgacctcagccattgcctatctctattgtcatgaatgccacgctgttcaccaccactgtcctgcaaaggatagacaaaattcacaaaattagcgcatttctttcataaatagcaaaagtagaccaagaattcaacactactacaaaaacagtgtcatccaccacccatcaagttaagatctaaaccattagttgtttccaccaacatttctattattgtaataactattacaagaccataagaaaggtttctcatgtttaacgcagattaagcagtctgatgtgttataccttcattcctatcaacaaagacaacattgacacataatttgctttggcgccagtacctaattaagtaggatgcgattttttttttcagtgtaatgtttatcgtctgcaattggtgatatatgggagctacaaacttgattccgagttagttatgaaggcatcattggcaaatcctaccatcgcaggtgcagtgcttttgacctgattcacaatcctgatatcgcatctagaaggcaaatcttcggactaaaaaaaagttgagccattataaatagaaacgaatggtaagtaaattcttgtttgcaatgttacatgtttgttaaaagtatcactgatccaaatacagtttaaatgtatacctgctgtcctcgcaacttaaatgcatttaagcaactacagcatcctttgtttgtgaatcatcgctccacaattattacaccagtatatcacaagtattcttttcatcctgccgtcagtcaatacgaggtcaatgtttttgaagtaccttttttaccaatcatctttgatcagaactgacctgaattgaaattttgaatgcatccatacaaccgaattggctagggcatgatagcagttagctgtttgaatatgatctggtgcttaaatttatgatctagtgcctaaaatcttaattgcagcctttaatgtgtctaatttattcaaaactgaacatgtgacacataatagaccattatattccaaatgcagttgattctcttactgattcatgtcacaaatttcaaatccatactattctagagatggagtttccatcaagaaggttatggttcttgccacgccaatcttatgaaaacaaatatatagtactaacaataaaatattcggcaaacattttttccgaatgtcagccatttacaaaattaagcatgatctcttcgtactgatttttttgtggctcaaatttgttggtattatagattaaaacaaaaatctaggtttacagaaccaatcttagcatggggttatgatcatgtttcttactatgagtggccggagtggttcatggtcttctgagttttccctgatgaccaaggatgatagcaccacgttgaagacgataggatcttatttattcttttgccttgaatagctcctgcacagcatacaatgagaatcatcgttttgtaaacttaatcagagtaagaacagcaataccaaagtgatatttgcaatgcagatgattctcaaagttcaattctcaatctccacttaaagcaacataaaaatgtactaccaaagtctatcacatcacaagttcccaaccaaaggagaaatgggaattataatacatgaataaaatatagccccaaaatcagaaagacagtttttttttttttttttttttttttttgaaattccaatagctcggcattcttgaaaacactataaatcagagcatggtcatttaatgcttggactatagcaaaaaatagaaatattcagagtaaatgactattaagcaaagaatgttatgatttctaatataacaaagatgggaatatgtagagaactttcgagtttcgtttttcatcaagacctcaaccaaactgctacaaaatatgtggtactaactactaaaataggagaatccttcattgataaaaaaaaatctaaaaagatattgtaggtagaagcagaattacagcaaccatgtgcttgatcttcctcacaagcaactcacagtgcttcatccacaacatttcaaagatagtagcataccactaaatagtgcctctttaatcataccaacaaatgtgatattattaccaggatcccacaacgtgatgacactgtcagctgcaaccaaaaaacagatccctcacttgaaaaagttgcgaatgtcataggtttattcctgcaattttttacttttctatgtcatcatttacatcatttgccagaaatggcaaatcattttatggcagcctaagcacgtggtatacaagtgccaacagtatatatggtatggcatccttgaccattaaatattagaggtattgtttagaggaaattaaataatcaaatcaactcacttgtatgaaccaaccaattgacatccccaaccagattgttttttttttcatcacttggttgcgaaagcatactttggacccaaacctacagattaattggtcacaagagaagcaaatgaagacctcacggcttgagccgtgttttttccagggcgggaagcaacaatagaaatagcaacattgctgtgtgaaagaactaaaccaaatgatagtaaaaacacaagaaatatattccatttgaccttataaacatgtgccaacctatgcggcaggttgaagagtacatatatagtaacaatttgagaggtagagacaaaacaaagttagaacatctaaaataaaagtccatatgcacctttcattagaggcttagagtattgaaaaaaaaaatcccaatctatcagctttcaggagatgcgatagcctgcacaacccaaagcatgacggtcaaaagacgagacaatccaatactcaggttgccttgaccaacacaagatattatttaagttcatacccttgcaacaggaagaggaacatcgatgtaccgtggccattcgccttgaccaacacaagatattatttaagttcatacccttgcaataggaagaggaacatcgatgtaccgtggccattcacatattgtctcatacatcagctcagcctgtaacatccagaacatttttatataaaaaaactctgaccaaccaacttgaagattcgttcattgctgcataacaaaatgttgtgcatgataattaccagatcatgaacagtataaatctctggtccaccaagtccgtagctctttcccatgctggtgccatcatccttgagggagttgacaatagcagcagcaacatccacaacataaacaggctgaatcctgcaaaaaccaaaaggttgcattcatgtaatctcacctgctgtggaagtttaagatgcaggtccccattgattgcctatgactgattaaaagccgtaatggcttattagtgataaaaaaagtaatttatgagtaaaacttttacatgtgtccttagtggcttaaataaaagctaatgctgaaaaagaaactacgttgtaaaagcatcaaaaccaacttcaaaatcaagttttaaaattcaaatcaagccatagggcaaatgatgaggcctgtattctctgatcaattaatgttctagactaaattttgagtcaagggattacgacaacagccaacaggaaagctcaattactttgtagaccgggaatcaatttttagcaaactgtacccatctgttcaaaatccgatcttctgtgccaatcatagttgcaggcctcataattgtagcctgttgatccatgcaacacagaagtttggttaaagtaaccgccaacataaatgggacatgtttgcttctaactttgggtagtatagaaacagaagttcagtattgcctaatgcagatgatcacctcaggaaattccttcaacacagattcttccccagcagccttggccctcagcattctagaagaagaggccgatgctcctaggcaagaaacctggataaatctcatgaaacccccatgctcctttgaaacctgtgcatagtccataacacagttaatagccagccacaaaagaagtcttgatgggaattaacacaaaagaagtgttaatagcccgctgctctaatctctcctcttttatctgctcttatctctcctcttttatcttcctcaaatatgtttatagctggcttatagtctgctactgtatctgctctaagaagagtgaaggtgtcatgtggggcgacatgtgcagcaagcagcaaagatggaagccaggcacatgcgcagcaagcagcaacaacacaatcaaggattagagatttggaaagtttttcaacaaggaaagtcttaattagggagaaataatgattatttccttgtactagggaggtcaagtgcccatataaactactagatgtggttgcgcggcgtgccgtgagagttgtcacaaatttgaataaattgatttataacttttttttacattaggtttgtactgttatcgataaatatttaagtttttctttaagttaagaattgttgctttacttgaaagatggtaatttttcatagcttttttttttgaaaatatgtataataagtatttgtttgcacgttttccaatactgaatacgcttctttatttacctttatttttactgaccaatcaatgagttgttgccggctctgtgataatcttttgaacttgagggcctcagcattctgttaggacctagcactgagtgtatagaactcgtatatgaatagttgtaaaaatgtaattataagttttaaatattgcattgataatacatagaatccaaggcgcattcctagacggatatagtattttatagacatagttaacaaatctaaaagttgtagttttgataagtagtggatgcagagtatgtgcaagaaggtgggggttaataaagatgaggtagttttttttttccacctgtagtaattgtggctatgaagtgtttgtttgcaaacaatacagtgggctgttgtggtgataacatctttttttaattagtaattgtatgcgaatgtggaaagtgtagtgtatccgaacattattttgtaggatgtaactttactaagaaaacctacatcctaagtttcatgcatactacacacatcatatataaacttcccgtgggtctatctggcttgaatttaactcgataaattttatcaaaaggaaaataatctgatctatcttgattatttgaataaggtatgtgctctctgcatttacagatagacccattaaagaacaaggtttttttgaaaatgaactatggaaaatgcacggcctgactgaatcatttacactaaatcataagaactgtgatccgttcaatgcagaacttcctttctcaattagaatttagctatgttcttgacaaactgcaatataaattatccgaaggtacacaactggtgtttattatattaagagcaaatatgcacatctgccatggcattacttatggagtcttgaatggactctagtgttactgatcccagggcttataatcgtcacagtaggatacttcagcagatgagctgaccttctcttggcaatctgctccacagttgtcaaagaaccaatcaaaatgtaatttcaaccaagacagagagaaaggagagagaggaaatgacgggtgataagctcagggtgattcttcagagtgctagtagcagccagagatgaagtacaaagcagtagaacatctctttctgttgattattcagagcagcagggtaaaaagtgaaactggattaggacacattcctacttcagaaaagataggtgaagagaatatttgctgtacattcttccgtgataatttcagtttgaaagtggatggaggcacaatttaacctttgcagcatacaactcagaatagcacagtacgatgcttcactggaatgattaatttatattttgaactcatgaaacagtaaaaattgaagtactccaacacatttaaccagtctgaaccaaaatagtacacagagtagaaatcaggaaccatggtttgcagagcaataaagcatgaaaattcagcaaatatactgaatatttcaacattggcacaataacaactaacttcaaggagacaaggactcaaggaataatccctgcaagtatgttcaactgataggacatatacatttctggaatgtaaatgaactaaatttgtttggcaaaatgaatttgtcagtaacattttagagcactgctgagtgggaaaagcattcagctgatcactctgactaattatgtgggcaaaaagcaatttgagaagatggtgacggctaaacttattatcttaattcggattggtatttttttagctatcataggtggttttgtttagaggtgtggacagaaggtagcaaaatttctttgggaggcggacttaacaaagtgtagtctgttgatttacgtgaaaggatttatcaagagttaatattgtgacaaaccaaatctgggttcgtgataattaagacagttaatggagcaaatcattttagaatgattcgttgtcagattgtaaatcatgatatgtgtcactaaaataatctagactcacaacatgtaagtatgtgactgcactaccacacatccttgcacacagagtgagaattaattagtagagtggtagagcatatataattaaaatgacaggcttgagaaaaggtggtgcaaatcaacagggaaaaaattgaattaggagcaaacctgacttctttatcaaatccaaaatgagccccaaagtaaaatgccacacagtatccatgaatcactacggacagctatcagggacaaccaatctttccaagaacgtgcaaagaatagattggaaaatcacaggtatgcctgaaggatcaagtaacttttcatctcgttgtttgccacaagatacatcttgttcaccaaatgagttgcatataaaataattgcatcattgaattttgctcagtggtacgaattatctgcaatgattaagtgaagaagataactgctcagagtttccctggtacaattaaaaaatacgaacaccagtatgaaatacaaagctgctggattgttgcaaaaataacatgaataataacaaaacaggaaaaatggaaaacaaattagcgtatgtaggaattgcatagttagcaattaaaaaacagatttctagtgtttgtccataccgtgaaagatattatctccaattgttcaacaataaagggaactaaaccgataggggattatgtaatccaaataaacctgtgatgaaaccgaaggagctagttcagcgaaatgtagtagttaatctgctagtccaaatattgttgtatcggaaagaaggagcagattcggatactgaaatctgttgaaaattgataactgggccacaaagaaatctgcaataatcacaataatgattggaaagagaattagctcgattggggacaaagtgacgaacctgcactaggaataatggagatctagtggaacaacgtcctagttagccgagaggatggatccagcaatttcttcatatatagaaatgacgaggattgggcctggctgcatagacagcagaggcatatgccaccagcccgtactgcatcagtgccaattcagcgaagaagaaggccatgtgctccatcagcattcaccaaaagaaatcttgagtacacgcttaaacttgtcgcttagcaatgaaatataatctggtggtaaacagaaacaaacaaaagccatggctctttacctccttgtcacttttgttatctgcagacgcagatagcatcataatgaagacatatggtgtaggaatggtgagattccactgaagcttattcagaatccccttctccattgcaagaatctgttccctagtgtatgcactatctgatatgaagatgaagtcgttcacctgcaaatacatacacagagatccaatcagaacaagtccctgctagaaatggacagtgcagagcaaaggggataaaatgttgctacctctggggcccaaatctcctcgtacttgcaatctatcagcatggcagaaacggcgaccagttgcagctccctccgctgcacttgctgcatcgagagagagatttgtggcgcacttgtcgcttgtgtgtaggcggtgccgccgagcagcaattccagagctccacgccccaggacccagccatcctcggaggccgcagcgtctcaaatagcattgaggtagaccacgaggaacttagacagccggtcgtattccttctccctctccgccaccatcgccctcgactcgctgttcgcagcagcggcctccctcgccggctgcttcttggtgcttgaatccttatttttcttcttctttataagtaacaataggacgagtaaatacttgacaagaaaaaagttgtcgcaagggcggtggaactgaaatatagtctatatcggctgtattttgtggtgattagtataaatcagcattaatgaatggtgatgagatgtaagttctgcatggaaagtaaagccaaaccaagctcaaagcaccgacagaagcaaaatatataatttgtggatatcatgatgacggaataaaacaaccaatttgagataattattattatttcaagtactccctccagccaaatttatttggcattgtttctaacgccgaataaatttgactagagtctagaggtagtacatcctaacaccaaaaatctatcaagatgaccctttgttttccaagaacttctaaactaccaataccaagatgccacaagactacatagttttatgttcgagaaaaacgactacacaattttgccctgttaaaagtaaacaaacaagaattcatatgaaggtaaatagaactttggtggcactccctgactccaataaagaacataaacatgaatataataaataagcaaaagttggttcccaaatagttgcaaagaaatgtgaaaagcaagcaataagattcaggggaaatcaaaggacagcaatccttacagttaagataatcttcaaacccaaaatcatctaaggaaccagtcagtgcctcatatcctagcatagatgacggcaatgcaccagggggcctttggaacctggcaacagataaatcatcaatcaaaacatctttcatgttagcctgcccaattaaaagcaatggagatgagttgtgcgtgctgtttttctcctatttgcagtgtattgatgtgctaattgttactagaaggggcagacaaacaaaaacaacatcaagatactgtgaattcaaccagaccaagggattcaagcattctgagtgatccatactagaacatacaaagcatcaacaaaatcttagtaacctgagcatatcgatatgtggagatgctcaaaatactacacatgcacaatattttgagaatcaactattctaaccaggaaaattggcgtatataacaagaagtttcagaaggaatttgcacactgtcagcagaatacaactgatgaccaccaacaataacatcactgatataatacgcacataggaaaagagttgcagacttgcagtaaatgcaaagagctactaccagatttacaactagacacacacacacacacacaaaaaaaaaaaaaaaacgagctaactgcaagggcaatcttaacaaacacagggaggatataaaccacatcgaattcaaatatgcatatctcgtgcccataataagccagcccacttaagtttacggacctaacagttccaacaagacatgtaatactgcctgctcagatggaactactagtgcctatctatcaacttggacagatggtggtattgcagcggaaattacatggggataggacagtgaattacttggagaggatttgggcatcaagatccttgcggatgttgaaggcggatccgtagatggcttccgcgccgaacctcttcttgtccgcccagaacttggcctcctgcgcgcgcggcggggattcagcgtgttagctagggtttcgagggcgagagggggggagaagaagaagaagaagaagaagaagaagaagaagaccttgtggacgctggcctggagcgggtgcggcggcgcgaggtcccccttgacgctgtcgttgacgccgaagcggacgacgtcgtggttcccgccgatctccttcttcaccacgccgccgctcgccatcgtcgcctgcgaagctctctctctctctctctctctcttcactcatcactcattctttcattactcatggaacggtccagatcatctctgtgtaaaatccaacgctcaggatcgtctccacctctccaccgcgccctcctctccgccccctttctctcgctctcacgcgtccccgcccctccccaaccgcgcgccgctccccaaccctaatctctccctctcacgcggcgccaccgccgtcgtcgccgccctcgactgccgctgctccgccgtcgtcgcatccgtcgtctcgccgccaccgatccccgcgccaccaccatcgccgccgccctcgactgccgccactccgccgtcacccatcgtcgcatccgtcgtcgccgccgccctcgactgccgccgctccgccgtcgtcgccgccaccctcgactgccgccgctccgccttcgtcgcatccgtcgtctcgccgccaccgatccccgccgccggctcgccctcaaccaatccccatcaccgtcgtcgcatccgtcgtcgtccaggatttacgtcaccgttccgtcaccgcacccacacgatgatccccggcgacggaacgggtcatggtggccagggaggatactcgggcccgacgagctcccggcgtctcaggtaatgtcgccgaagacaagaactccggtcaagctcctcggccgtgaggacgcaagcgtgtgagggtaccccttttccctcaaatttaattatgtactctgttacttagttctataattcatctgctcggttagtgtcccatcacaatcgcttggtcaggattgaatgttctgtggattggattgggagttgtttgctcaaggagcaattagggaatattttagttggttgcggctgcaaataccatcagaacaacaatggagtatttaacaagagccaacagccttttgtttcagatgaattccctctgaagtcacccgtcaattgactaatgttagacaatctaccatctagaggagatcattcctgaacccaatatggtgataagccgcctctgttgatgtgttacactcattgttacttgttctgaggtgtacaccttgcttgctatattggaagagtgaatttaattcacatggatataatattttgcaatttttgcatatgaaattatatgcatgttcttgtgatgtgagaaggttaaattcctttgtgggatgcccatttaatttctggttgctaattttactgaagaatgagagtaggttatgatgtcttgggttttgataagtagggtgtaaatttatatagtacaataaacatgcgtgctggtcattctgttatgttggattgaaacaagtgatgctggcaattcaggtgcagaccagcttttggttctgtaaattattttctcaatttaaatagatcatgtattgtgatgatgtgaatacaatattatgatgttatcatgtgttcaacagagcttaaaaaatactcacaaactggattctcgtagttatacagtttaaataagttataagcacgatttgggtttgatgtcttccatttgatttttggcgctcctccctcttgctccgatctggccttagtgatgccgccctgttttcgcggttgaccccggcaccagccccttcctctggccacgtgcgagttcgagattccaagtcccggtggtcggatttctcaaccccggcactggcctcgcacaggctgcgatccgctcgccaacaaggtaagtcgttattgggatgtttatatctgaaaatttagataatttcttttgaacttcattgcttggtcaacaacataacccaggaaaccaattaaattgatagacatgttgtgtgctctcttaagagatcaacatccaaattgacatccaagttaaaagaagaattttattatctaaatcatgatgccaatattgagagtttcttttactttccgttgtatacagtttctgtgatgtgtaccgaaggttatatacataatgagattttacttcaatggtggaattgtgctctattaaaccacatggaaagttctgatttgtgcagtgataatttttccctttaaaaagtcaaatttggtttacatttttattcatgacacctgaatatgtaaaatgccatgcattagtaatgtgcaagcactttcaatgtattgtctaaactctaaaggaacaacttaccagtttattagtgaatttatgaaaaaaaatcagatgtttaatgtctgaataaattcagattctcttctctgcttcatgccttcatcaggatgaggtagttagtgttgtactgtagttgacaaatcgatttgttcgcatcgtgataaggcgcagaaggtaaggcggaaattgccttggtttatcctctccccctaaatttcctctgctgcgattggttgattggttaatgaaaaacccgatacttgcaagcagattctgattagattctaattattgggattttctagagttagtttaaggaaaagtgagttaattatcgacgatgaaatatacacttccatgattagaattatatatcgaatagacaaatatgtgtatgtattaaaaatatctgacaaaatggactgtatgattataatgcctttcaaccattgctttgtgcaatgctcattatatctcccggaaattaattgatttctgcttttgtaccatgtgcgatgtttacttttaaactgctcaggttcattctatcttattttctggtgcttctgaagcgatgtatatttcttcatttttaaactgctcaggttcatgaaatcaggcgatgactacctgccacaatgcgaagacagacggtcagccgcctacacaataggctcctacactgccaccatcactgaatgcacatctggtcctcccttattttcgttggtatgtagtatgtacgtaagaactaacaagtttattcattcaaagaaaaactaacaagtttatgttaagcttcctttttaataatattttacattactgatatttagtgcagtgaaaaatgctgcaaatctctgatatttagtgcagtgcaaaaatgatacatagcttgattggatgctctttctcattatggccgactgcctgatggaattttttccatgtgaaaacaaatgtttactctgtttcaggcttgtgtagagaagaaaaggtggaattgtggaaggtaatcgcggggagttttggttcattttttgaagatttctctaattggtacgtactaattaaccaattggagttttggtctcgttactcactgtaaaaacatgatggtaaaaaaacagtttaatcctattggtactcttttatcccattgaacattttgtcgttgtgtcattgactgctatcaaaaaggaaaaacagtggatgactctttcaggaaatataggatagccccattgatggcacattttgaaccgttcatgatccctgatttattctcttgaccatattctgcactgctatacttgctaagtaatacaaatatatttatatccctgtagcatgtgagttactctataagacaattattatttttacataactaattaacatttttactaaactcttttattttgacaatcactctaagacgtatgcaattgcgtcttacgaaagcaagtgaccctgagagcactgatctttgtaaagatgcacacagcttactgcaggagaggataacaaaatagaagtctataaaaatctatagaagggatcaaatatgcttgactgaatgatagagatggaaaaatgaagaagtgatgactgttgtttcacaatgtattcatttcatctatcctataattgtagtggtgtgtcaatgtgtgatacttctagatttttccagctccattttgccagctccgtgtgtgttaatgattcagaaatcgtggaattgcttggaacatgtactttattctcaaccattttttgtggaagtgtggatgtacattgtctaatatattggtattgaagtgattaaatatgattattgatggttttgaattaatattttagataatataatatcactgtactttgccttaatatctgacctagatcaaaataaagctcaattgggtggattctaggaaacatatttttactactccctccatttcacattatgtgtctagattcattaacatctatatgaatgtgggcaatgctagaaagtcctataatatgaaacggaggaagtaacgtgtaattagacggatcatattcgggctcgatgcactgtatattagaggcagcccatgtctgactctgactcagtttcctcttcctggtgggctggtctaggctgggccggcccagcccgactgctgcatggatggccaacgagatattcgtattcggcaacagttaataaaattcttagttggattttttttttcacgcgagttcacatgtcctcacaatctatctacatactatatgtagtttgcacgaatattagggcagatatattaggtgataacaaaatgtaccatgcatgatgtttactttatatgatttttttttataagtgtaagataccttgtttatgtaatttttctatttcttatatatataaaactttgaggttatcaatttggacgtgactacacaactagtggtaactggtttgtctcactccatctatgagagatcctatccacctatacttcaaataaaattttctcttaaactactcatccgatctacgattcgattacaccgttgtgttcgtaacaattaaatctttataacaagatctcacgtgattatattttgatgaaaaattgtaaattacttttataatatatctaaattacttttagatttcactaaattacttcttagacgtataaaagtaaattaataaaaaataaaagtaatttacatatattatagagtaacttataaaaagaagtagctttaatgcatgccttttttcaatggacgtgactacatagctagtggtagccactccatctagtgtctcctttcaacttgaaaaatacgatagtgtgtcttttttaacctctttaataacttatatattttaaatcacatattgttttgaaaatctatttgcaccattgtgctccacttaaaatatgcgataaaacaagatccatattaaatatattcaaatattttattaatttaaaagtaagttattacatgttaggaagtaacttccatgttatcaggaagtaacttttacatcttatacatgattaattctcattagttactccatcaatgttatttacaatccatcaaatgttttatcttcttttcttgtactacatgaaaaacaaaagtgaaagggaaaaaacaagagagaatgcactcagtactactgagtttgtcacccttctacaatctaccactgacattgtaaagttctataatataccaccgtgttttgttcaacctctactatgtgccatcactgtctagttaacctctgttagagctctaaaaagacctatttgcccctagcccattctacaggcatggctacctccttgttgtcataaggaaggccagctccttgctggcggtgggcgaccggttgcagcggcgctggggacgacggttgcagtggcgtcggggacgacagtgatggggatggaagcgctaggacaccggaagtggaggggcggtgggcggttggacgaggcagcggtgctgcgagcaacgaagccaggacgccggcggtggaggtgtggttggtagagaatggggagggcggcggcgctgcgggcgacggcgccaatacgccgacggtgaaggcgtggtgggcaaaggacggggagggcgctggcgctgcgggcgacggggagggcggcggcgctgcagatgacggggagggtggcagcactgtgggcgatgacgccaggacgccgacggtggaggcatggtgagcagaggaaggggagggcggcggcgcggcgggcgacggcgccaggatgccggcggtggtggcgtggtggtgaacgacggggaggacggcggcgcggcgggcgacggggccaggatgtccgcggtggaggcctagtgggcggacaaagggaagggcggcggcgctgcgggcgacagcgccaagatgctggcggtggaggcatggtgggcggcggcgccaggatgccggcggtggagtcgtggtggctggatgacggggagggcggcgcctggtcggcggcggtgaggatttaggaaatttgggctagggttttagtcaattaatcaaagggcatttcaggcattaagagaaaaatcaacgctccaaacggagggcaactaacggtttgctgatggtgatggtacgcagtagagattgaacaaaacacgatggtgtgatgaccggtcaggccatgagtttttcttttggactggaagttatttaattaatcatttatagaatttatattaatgtgcaagtcatttgacatgtaaagcaaaggagggaactaaactttccttgaataaaccatgtttggagtattttcatgtgattcgccatccctaaaatattgtctgaaattttctcggaactcaacctttaattttaacgatgccaatggttacgccttttctagaactctttggccatatagttacacggaaaggattggtgcttctagctagacatatatgctaacatctgatggcatgtcgagacaggtgcacgcgtacagtcattccatggatcgcatacaatagctactaaatcacattagttgttgcaaagccatgacaataaaagatagagaggatgttctcccaatgacctgtagggtgaaacggagcttgagacaacaagttcttccacatatataattttttttggggtctttcaattttcgttcgttataaatatgtaacgggaattttacttttggtatatcattactatcccccaatgttctgagactatcttcatttagaaaaatatatcgcagcccatttgagatattctacaggaccgggacgacgatctaaatctttttcttttgtcatctgagaacatttttgaaaaaaaaattaaaggcctacattagataatcacatgtctttggattagctagaacaagataatgctaacctacacattatggaaaccgaatgttcatggtactgtttagcacatcaagcaggtccaagttgttgtttgccagtttgtgcagcctatcaagtaaaatatcatcgcaatagaataggtcgtgttatacgtgtatggcaaattaggtaacagattaatggcgctaagcttaattcatgacatgactgccatttaggctggaagtgtaacaagaaagcatattcttacaatccaccatccaaataaaaagtgaccagtagatacaacggaggacatagatatttatttgaattatttaaacgcatgcacgcatgccatgagaacctcatcactctctggtcataaggaacgcatctctagcaaccaaagatgacaaacatgcatataattagcctcattggtggtccatgaagctctcccagccccatatatatatatagctcctttgctatcatgtacgtagtatataacatgagcatcagggtaaggaaagtcatctcaaatccacaccagttaccctcaatagaaacggtgctaatggcccagaacaagaccatggctctgctccttgccacccttgtggcggtggttgcggtagtacgagccaccgaagagaaggatatagaagaagctgtgtgctcagagcattgcaacgacgaggaaaaagaaggcaccatcgaccacaagcactgtgtagacatctgcatcctcacgaacagggaactttttggggccttggagagaggaatgaagccctcgatggagcaattcagcgctttgtgcaatgaggggtgtagcaaagaatttaaggaggatcctgccaccaacaagaagtgcgtagacagttgcatcgtcgatgctaaggaactcaatggacacttagcgaaaggtggcgcttctagtgttcccgcacgtgcatgattgtgtcgagctgcacatctgttccttcatccatgatcgagggacgatacccattaatggttcccacccagcggtcggccttgtattacattgtcctgttgttccttttgcctcttcaattgtttcattatttggtgttcataacttctatgtgatcgatctggtctgttgttctacccaatattgttactaaaagcatttgttatctttaattgattaaaatagttccagttgtgctttgtcttttaacattcattaatatacggtctcatattccactttgagtacgtgcaatgttagtacatagatatagttcatgcttccttccgcgcgtccggtgcgtgccctgtgatcatgctctcttggaaaacgcaacaactagggcaccacgatacacgtgcatctactcctagtcctactgctatgagagagccaaagagaacacaaaaggcacgcggccacgctaaactcttccaaacaaaactaattctccgctttcaaggcacgctgcttttgaataggtacaaaccggtaccctcagtgatgatattatacatgtttctctagcgtaaaaaatatgtttcagttattgccttgacatgttgcaccaatgtgttgcatcgatgagtttacaggtatgttgtttcacgaatacaatatcgaaggttccgatttgaaaagtatagcttttaagtgcaagactgaaacaatctttttcctcgttagagaacaacaccatattaaggcaatataatacatacatttgatttcatcatttttttttaatttttgatattgggcctgacgaaaataatggatcttgttttaacaaattaagctaaacattttgtttcgcaagcctatacaaaagtttcagaaatgcgagttttagtacataatacaccattgtcgtgtgatgaccggtcaggccatgagtttttcttttggactggaagttatttaattaatcatttatagaatttatattaatgtgcaagtcatttgacatgtaaagtaaaggagggaactaaactttccttgaataaaccatgtttggagtattttcatgtgattcgccatccctaaaatattgtctgaaattttctcggaactcaacctttaattttaacgatgccaatggttacgccttttctagaactctttggccaaatagttacacggaaaggattggtgcgtctagctagacatatatgctaacatctgatggcatgtcgagacaggtgcacgcgtacagtcattccatggatcgcatacaatagctactaaatcacattagttgttgcaaagccatgacaataaaagatagagaggatgttctcccaatgacctgtagggtgaaacggagcttgagacaacaagttcttccacatatataattttttttggggtctttcaattttcgttcgttataaatatgtaacgggaattttacttttggtatatcattactatcccccaatgttctgagactatcttcatttagaaaaatatatcgcagcccatttgagatattctacaggaccgggacgacgatctaaatctttttcttttgtcatctgagaacatttttgaaaaaaaaattaaaggcctacattagataatcacatgtctttggattagctagaacaagataatgctaacctacacattatggaaaccgaatgttcatggtactgtttagcacatcaagcaggtccaagttgttgtttgccagtttgtgcagcctatcaagtaaaatatcatcgcaatagaataggtcgtgttatacgtgtatggcaaattaggtaacagattaatggcgctaagcttaattcatgacatgactgccatttaggctggaagtgtaacaagaaagcatattcttacaatccaccatccaaataaaaagtgaccagtagatacaacggaggacatagatatttatttgaattatttaaacgcatgcacgcatgccatgagaacctcatcactctctggtcataaggaacgcatctctagcaaccaaagatgacaaacatgcatataattagcctcattggtggtccatgaagctctcccagccccatatatatatatagctcctttgctatcatgtacgtagtatataacatgagcatcagggtaaggaaagtcatctcaaatccacaccagttaccctcaatagaaacggtgctaatggcccagaacaagaccatggctctgctccttgccacccttgtggcggtggttgcggtagtacgagccaccgaagagaaggatatagaagaagctgtgtgctcagagcattgcaacgacgaggaaaaagaaggcaccatcgaccacaagcactgtgtagacatctgcatcctcacgaacagggaactttttggggccttggagagaggaatgaagccctcgatggagcaattcagcgctttgtgcaatgaggggtgtagcaaagaatttaaggaggatcctgccaccaacaagaagtgcgtagacagttgcatcgtcgatgctaaggaactcaatggacacttagcgaaaggtggcgcttctagtgttcccgcacgtgcatgattgtgtcgagctgcacatctgttccttcatccatgatcgagggacgatacccattaatggttcccacccagcggtcggccttgtattacattgtcctgttgttccttttgcctcttcaattgtttcattatttggtgttcataacttctatgtgatcgatctggtctgttgttctacccaatattgttactaaaagcatttgttatctttaattgattaaaatagttccagttgtgctttgtcttttaacattcattaatatacggtctcatattccactttgagtacgtgcaatgttagtacatagatatagttcatgcttccttccgcgcgtccggtgcgtgccctgtgatcatgctctcttggaaaacgcaacaactagggcaccacgatacacgtgcatctactcctagtcctactgctatgagagagccaaagagaacacaaaaggcacgcggccacgctaaactcttccaaacaaaactaattctccgctttcaaggcacgctgcttttgaataggtacaaaccggtaccctcagtgatgatattatacatgtttctctagcgtaaaaaatatgtttcagttattgccttgacatgttgcaccaatgtgttgcatcgatgagtttacaggtatgttgtttcacgaatacaatatcgaaggttccgatttgaaaagtatagcttttaagtgcaagactgaaacaatctttttcctcgttagagaacaacaccatattaaggcaatataatacatacatttgatttcatcatttttttttaatttttgatattgggcctgacgaaaataatggatcttgttttaacaaattaagctaaacattttgtttcgcaagcctatacaaaagtttcagaaatgcgagttttagtacataatacaccattgtcgtgtgatgaccggtcaggccatgagtttttcttttggactggaagttatttaattaatcatttatagaatttatattaatgtgcaagtcatttgacatgtaaagtaaaggagggaactaaactttccttgaataaaccatgtttggagtattttcatgtgattcgccatccctaaaatattgtctgaaattttctcggaactcaacctttaattttaacgatgccaatggttacgccttttctagaactctttggccaaatagttacacggaaaggattggtgcgtctagctagacatatatgctaacatctgatggcatgtcgagacaggtgcacgcgtacagtcattccatggatcgcatacaatagctactaaatcacattagttgttgcaaagccatgacaataaaagatagagaggatgttctcccaatgacctgtagggtgaaacggagcttgagacaacaagttcttccacatatataatttttttttggggtctttcaattttcgttcgttataaatatgtaacgggaattttacttttggtatatcattactatcccccaatgttttgggactatcttcatttagaaaaatatatcgcagcccatttgagatattctacaggaccgggacgacgatctaaatctttttcttttgtcatctgagaacatttttgaaaaataaattaaaggcctacattagataatcacatgtctttggattagctagaacaagataatgctaacctacacattatggaaaccgaatgttcatggtactgtttagcacatcaagcaggtccaagttgttgtttgccagtttgtgcagcctatcaagtaaaatatcatcgcaatagaataggtcgtgttatacgtgtatggcaaattaggtaacagattaatggcgctaagcttaattcatgacatgactgccatttaggctggaagtgtaacaagaaagcatattcttacaatccaccatccaaataaaaagtgaccagtagatacaacggaggacatagatatttatttgaattatttaaacgcatgcacgcatgccatgagaacctcatcactctctggtcataaggaacgcatctctagcaaccaaagatgacaaacatgcatataattagcctcattggtggtccatgaagctctcccagccccatatatatatatagctcctttgctatcatgtacgtagtatataacatgagcatcagggtaaggaaagtcatctcaaatccacaccagttaccctcaatagaaacggtgctaatggcccagaacaagaccatggctctgctccttgccacccttgtggcggtggttgcggtagtacgagccaccgaagagaaggatatagaagaagctgtgtgctcagagcattgcaacgacgaggaaaaagaaggcaccatcgaccacaagcactgtgtagacatctgcatcctcacgaacagggaactttttggggccttggagagaggaatgaagccctcgatggagcaattcagcgctttgtgcaatgaggggtgtagcaaagaatttaaggaggatcctgccaccaacaagaagtgcgtagacagttgcatcgtcgatgctaaggaactcaatggacacttagcgaaaggtggcgcttctagtgttcccgcacgtgcatgattgtgtcgagctgcacatctgttccttcatccatgatcgagggacgatacccattaatggttcccacccagcggtcggccttgtattacattgtcctgttgttccttttgcctcttcaattgtttcattatttggtgttcataacttctatgtgatcgatctggtctgttgttctacccaatattgttactaaaagcatttgttatctttaattgattaaaatagttccagttgtgctttgtcttttaacattcattaatatacggtctcatattccactttgagtacgtgcaatgttagtacatagatatagttcatgcttccttccgcgcgtccggtgcgtgccctgtgatcatgctctctaggaaaacgcaacaactagggcaccacgatacacgtgcatctactcctagtcctactgctatgagagagccaaagagaacacaaaaggcaagcggccacgctaaactcttctaaacaaaactaattctccgctttcaaggcacgctgcttttgaatagctacaaaccagtaccctcagtgatgatattatacatgtttctctagcgtaaaaaatatgtttcaattattgccttgacatgttgcaccaatgtgttgcatcgatgagtttataggtatgttgtttcacgaatacaatatcgaaggttccgatttgaaaagtatagcttttaagtgcaagactgaaacaatctttttcctcgttagagaacaacaccatattaaggcaatataatacatacatttgatttcatcattttttttaatttttgatattgggcctgatgaaaataattgatcttgttttaacaaattaagctaaacattttgtttcgcaagcctatacaaaagtttcagaaatgcgagttttagtacataatacaccattgtcgtgtgatgaccggtcaggccatgagtttttcttttggactggaagttatttaattaatcatttatagaatttatattaatgtgcaagtcatttgacatgtaaagtaaaggagggaactaaactttccttgaataaaccatgtttggagtattttcatgtgattcgccatccctaaaatattgtctgaaattttctcggaactcaacctttaattttaacgatgccaatggttacgcctttttctagaactctttggccatatagttacacggaaaggattggtgcgtctagctagacatatatgctaacatctgatggcatgtcgagacaggtgcacgcgtacagtcattccatggatcgcatacaatagctactaaatcacattagttgttgcaaagccatgacaataaaagatagagaggatgttctcccaatgacctgtagggtgaaacggagcttgagacaacaagttcttccacatatataatttttttttggggtctttcaattttcgttcgttataaatatgtaacgggaattttacttttggtatatcattactatcccccaatgttctgggactatcttcatttagaaaaatatatcgcagcccatttgagatattctacaggaccgggacgacgatctaaatctttttcttttgtcatctgagaacatttttgaaaaaaaaattaaaggcctacattagataatcacatgtctttggattagctagaacaagataatgctaacctacacattatggaaaccgaatgttcatggtactgtttagcacatcaagcaggtccaagttgttgtttgccagtttgtgcagcctatcaagtaaaatatcatcgcaatagaataggtcgtgttatacgtgtatggcaaattaggtaacagattaatggcgctaagcttaattcatgacatgactgccatttaggctggaagtgtaacaagaaagcatattcttacaatccaccatccaaataaaaagtgaccagtagatacaacggaggacatagatatttatttgaattatttaaacgcatggtatcatgtacgtagtatataacatgatatatatatatatatatatatatatatatatatatatatatatatatatatatatatagctcctttgctatcatgtacgtattatataacatgagcatatgggtaaggaaagtcatctcaaatccacaccagttaccctcaatataaacggtgctaatggcctataactagaccatggctctgctccagtatgagcactgacattttgaccttcatgatcactggaagaaaccaggtctgtatgagggaaaagaaatcaaaccgagtctttcagaaacaaaatatagaaatttaaacaagatggaataaattacatgttttgttacacatagttgcatcaacccaagcattttgacaccatcaaacccaagcatatgtgaaaattctgctgcataatccagtgcattatcacctgctatagttttccaatccttgaagatccttcatagaaccagaaaataggattatggctgttgcagttaaaagaatttataggttgctattgcagttaaaagaagtaacacgctgaaaaatccatagaataattaatgcaattttagaggcaatataaatcccaagcatactctgattttggcattcctttgccgtaagccttttgaacctcactcccaacctgaaaataagtgttaaaatagaaattctcaatcaattaattgtggagggcctagaaagaattacaaacaacagaaaaatgtttttttgttaatttattttgacatgcaccatctctgaattaaatataccttcaaataagtggcaacagcccgtcgcaccctcgccacgccgcgccctcgtcgtgcccgccgccggctgtcggccaccgctgcttccgactgtgctcacgagataaagaggaagaggggaagaggggaaagagagaggtgagagagtatgacaggtggggccgtgactgaaagggcaagagtgacatttttcatgtccgggcctatacgtggctattttcatacagcctcttggcgtttgctatccgtttaatatgcttggcaaatgaacttgaattagtacaagtggatctctagatttgtatgtagaaggtcgagatgtttgcaaatgacatatgagttgagttgagtgatctagaatttagttcctactgtggaatatggatagctccagaaattgattttttttagtccatttattttaagctctactatttgttaagtttattctcaaaatatttaatttatagtattatccacaataattggagtgcaaaactgaccaaattaaagttgccatatgttcatctggaatctgaaagctggccttggtctgcttcattttggtgtgaccggagcccgtactcaccgttagctaccatccccaacctgccctaatctttctccaggttttgttgctagcactcgatctgtacacgctgtgggataattgcttgttgacaaggaagatcaaatcctgatggtggaagaatggcaccccctgtgcttcagctaacaatctgattagtttcctagatgcttgattattgattttatgtgtgatcattttattttgtttttgtatcagggttgcatagagtataaaagctttgtccccctatgcttgcactgagagactcttccgtagctgtcatcgcatacggtgttgcaagtatgttctctattatctccatgtgattgcacgggtagcatatgtattctcactaactgctcttacactaacaattatgaatcagactagcagagagagtttccaagcaaatttgatggcacatgtccacgaattgtgatttttaatagtttgcattataaatgctcatcttgtcctgcctcctttttcccttaaatttatttacatggtgcggcagtcagtatcctaaacagttaaaaataggactcactaaattgaagaaaaaacaaatagctctaccttgcttatgatggtccttcatattggagcacatcttccatgggtctgtagcagctcatcctgctcaaggttgactatatatgagttttggtcagtgaaggggatgtaattagtaatggaattagaacataggtaacactcgagttaattagtgctttgcttgcagtttcaatgcttacaccacaatttcattctctgcaattacattcacattttaagcttggtcttcttccctactcccaatcaccaaactcgttttttaatgaaaacacaacttggtatttgcaagttctctatctgtttttttgcaataggaaaactgttacatgttctagacaaaaatatcatttttaagaaccgtaacaagcttatggatgaactttgacaggttccttgacgaaatttgaagatgtaacccgccacccacgtttcgcagccatcgcccattatggacttgccaagtttctggtggtgcccattgtggatgaaattactgattgcctcaagtactcaagtttcatgagtataacaaagattacagcttgggtatctgtaaagtggttatgttgagataaaggacaataatgtgagatttctgtttacatctcaaatgttccctttaatttttttacgctactttctaacttggcctttcagtttaaatctcataatatgcattgtttcttttatccaggattgaatcttctagcctctacaaaactgaattcatatttctctcctcttcattgttagtgtaaacaatactctattcaatatatgtcgacgtgtctggcacgtgcacgttaactagtgattagttgtgtactagtcgatggtactatgagcatgcagtaattagatttactcgtttcgagattggacagctacatatgctatgtataattttttttctcagtaacacagatttgtagaaaaaataaaggtatgccgcgtacttgttcttcgtatatgttccgtaaacgcagtttcgtactttagacttttccatttccgagtaatatcaggtagtcaaaatctgcaggctcaaatattactttattcaaattttattactatataataagtagtacataatacatactcactgcagtgagtaccacatatatatatatatatatattcactaggaccccttattacaattatttatgcggagaggggccagaccgccagaggaagcgaagcagcgggcgccttatttggcgcatgtggctaatgcctctttcaggcatccaggcgccggagcccagccacactggttttcgacgtggttgacgcactctttaatgtgacctgggaagtgactggctatgtaaattaatattgctttgctcagatggccaaagataaatttctcttcatcgttggcgcgatcacctaaacaaaagaagaaagaaaaagcatatatgcacaagtaaggacagtatatatatatatatatatatatatatatatatatatatatatatatatatatatatatatatatatatatatatgcagatgaaaagatcgatactacagtactacttaagagatgacaagatgatgtacctgtaccaccagtcccacgggcgctgcctccagcggcagcggcggccgctacctccgtcattaggagaatgacgataaaaacagcatacgcgaccttctttgagtccattgtctgactcttgttagtggctggcagtaagtacagtacgtgtgcgctcgattttgatccctcccctgcctgctgggtgcccatataaatactactactccgatccacttcacacagcgaccaacattaattgaacatgccccattaattaactagtagtacaactccacatgcccgctaggaatcagtatcttctggagtagtagtagctagctagctcccgtgtagcattaactttctgccttcaatcattttacatcattgaaggagagtttcattattttggtataagagcaagttaaatctgtacgcagttggtgcaaagagagtgacaacatgttgggtaaatttgtttaaacagttggaaattagccaggtaaataatatataacaggaataaaatttaagattgctggtgtcaatagataacatttgatgtccagaactatgtaataaattcaacattttctaaatagcctgtcattttcgttggtcaggaaaacatcttgatttgttgaccactaatttcaatataaatatattcgtaaaatagatgaaactacaatggtaccatcgaagaaatatattcaaaaatgatattaatgctcgacattgtgtaagtttcttttcctctcattagatggaggtacgaggtatatgcctatttagccaagcttccttataattttgttcaaatttgaactggtccccaatcttttttttttttgaaagaaatcatccttttcaaattccaaaggctccagtactgacctcagccattgcctatctctattgtcatgaatgccacgctgttcaccaccactgtcctgcaaaggatagacaaaattcacaaaattagcgcatttctttcataaatagcaaaagtagaccaagaattcaacactactacaaaaacagtgtcatccaccacccatcaagttaagatctaaaccattagttgtttccaccaacatttctattattgtaataactattacaagaccataagaaaggtttctcatgtttaacgcagattaagcagtctgatgtgttataccttcattcctatcaacaaagacaacattgacacataatttgctttggcgccagtacctaattaagtaggatgcgattttttttttcagtgtaatgtttatcgtctgcaattggtgatatatgggagctacaaacttgattccgagttagttatgaaggcatcattggcaaatcctaccatcgcaggtgcagtgcttttgacctgattcacaatcctgatatcgcatctagaaggcaaatcttcggactaaaaaaaagttgagccattataaatagaaacgaatggtaagtaaattcttgtttgcaatgttacatgtttgttaaaagtatcactgatccaaatacagtttaaatgtatacctgctgtcctcgcaacttaaatgcatttaagcaactacagcatcctttgtttgtgaatcatcgctccacaattattacaccagtatatcacaagtattcttttcatcctgccgtcagtcaatacgaggtcaatgtttttgaagtaccttttttaccaatcatctttgatcagaactgacctgaattgaaattttgaatgcatccatacaaccgaattggctagggcatgatagcagttagctgtttgaatatgatctggtgcttaaatttatgatctagtgcctaaaatcttaattgcagcctttaatgtgtctaatttattcaaaactgaacatgtgacacataatagaccattatattccaaatgcagttgattctcttactgattcatgtcacaaatttcaaatccatactattctagagatggagtttccatcaagaaggttatggttcttgccacgccaatcttatgaaaacaaatatatagtactaacaataaaatattcggcaaacattttttccgaatgtcagccatttacaaaattaagcatgatctcttcgtactgatttttttgtggctcaaatttgttggtattatagattaaaacaaaaatctaggtttacagaaccaatcttagcatggggttatgatcatgtttcttactatgagtggccggagtggttcatggtcttctgagttttccctgatgaccaaggatgatagcaccacgttgaagacgataggatcttatttattcttttgccttgaatagctcctgcacagcatacaatgagaatcatcgttttgtaaacttaatcagagtaagaacagcaataccaaagtgatatttgcaatgcagatgattctcaaagttcaattctcaatctccacttaaagcaacataaaaatgtactaccaaagtctatcacatcacaagttcccaaccaaaggagaaatgggaattataatacatgaataaaatatagccccaaaatcagaaagacagtttttttttttttttttttttttttgaaattccaatagctcggcattcttgaaaacactataaatcagagcatggtcatttaatgcttggactatagcaaaaaatagaaatattcagagtaaatgactattaagcaaagaatgttatgatttctaatataacaaagatgggaatatgtagagaactttcgagtttcgtttttcatcaagacctcaaccaaactgctacaaaatatgtggtactaactactaaaataggagaatccttcattgataaaaaaaaatctaaaaagatattgtaggtagaagcagaattacagcaaccatgtgcttgatcttcctcacaagcaactcacagtgcttcatccacaacatttcaaagatagtagcataccactaaatagtgcctctttaatcataccaacaaatgtgatattattaccaggatcccacaacgtgatgacactgtcagctgcaaccaaaaaacagatccctcacttgaaaaagttgcgaatgtcataggtttattcctgcaattttttacttttctatgtcatcatttacatcatttgccagaaatggcaaatcattttatggcagcctaagcacgtggtatacaagtgccaacagtatatatggtatggcatccttgaccattaaatattagaggtattgtttagaggaaattaaataatcaaatcaactcacttgtatgaaccaaccaattgacatccccaaccagattgttttttttttcatcacttggttgcgaaagcatactttggacccaaacctacagattaattggtcacaagagaagcaaatgaagacctcacggcttgagccgtgttttttccagggcgggaagcaacaatagaaatagcaacattgctgtgtgaaagaactaaaccaaatgatagtaaaaacacaagaaatatattccatttgaccttataaacatgtgccaacctatgcggcaggttgaagagtacatatatagtaacaatttgagaggtagagacaaaacaaagttagaacatctaaaataaaagtccatatgcacctttcattagaggcttagagtattgaaaaaaaaaatcccaatctatcagctttcaggagatgcgatagcctgcacaacccaaagcatgacggtcaaaagacgagacaatccaatactcaggttgccttgaccaacacaagatattatttaagttcatacccttgcaacaggaagaggaacatcgatgtaccgtggccattcgccttgaccaacacaagatattatttaagttcatacccttgcaataggaagaggaacatcgatgtaccgtggccattcacatattgtctcatacatcagctcagcctgtaacatccagaacatttttatataaaaaaactctgaccaaccaacttgaagattcgttcattgctgcataacaaaatgttgtgcatgataattaccagatcatgaacagtataaatctctggtccaccaagtccgtagctctttcccatgctggtgccatcatccttgagggagttgacaatagcagcagcaacatccacaacataaacaggctgaatcctgcaaaaaccaaaaggttgcattcatgtaatctcacctgctgtggaagtttaagatgcaggtccccattgattgcctatgactgattaaaagccgtaatggcttattagtgataaaaaaagtaatttatgagtaaaacttttacatgtgtccttagtggcttaaataaaagctaatgctgaaaaagaaactacgttgtaaaagcatcaaaaccaacttcaaaatcaagttttaaaattcaaatcaagccatagggcaaatgatgaggcctgtattctctgatcaattaatgttctagactaaattttgagtcaagggattacgacaacagccaacaggaaagctcaattactttgtagaccgggaatcaatttttagcaaactgtacccatctgttcaaaatccgatcttctgtgccaatcatagttgcaggcctcataattgtagcctgttgatccatgcaacacagaagtttggttaaagtaaccgccaacataaatgggacatgtttgcttctaactttgggtagtatagaaacagaagttcagtattgcctaatgcagatgatcacctcaggaaattccttcaacacagattcttccccagcagccttggccctcagcattctagaagaagaggccgatgctcctaggcaagaaacctggataaatctcatgaaacccccatgctcctttgaaacctgtgcatagtccataacacagttaatagccagccacaaaagaagtcttgatgggaattaacacaaaagaagtgttaatagcccgctgctctaatctctcctcttttatctgctcttatctctcctcttttatcttcctcaaatatgtttatagctggcttatagtctgctactgtatctgctctaagaagagtgaaggtgtcatgtggggcgacatgtgcagcaagcagcaaagatggaagccaggcacatgcgcagcaagcagcaacaacacaatcaaggattagagatttggaaagtttttcaacaaggaaagtcttaattagggagaaataatgattatttccttgtactagggaggtcaagtgcccatataaactactagatgtggttgcgcggcgtgccgtgagagttgtcacaaatttgaataaattgatttataacttttttttacattaggtttgtactgttatcgataaatatttaagtttttctttaagttaagaattgttgctttacttgaaagatggtaatttttcatagcttttttttttgaaaatatgtataataagtatttgtttgcacgttttccaatactgaatacgcttctttatttacctttatttttactgaccaatcaatgagttgttgccggctctgtgataatcttttgaacttgagggcctcagcattctgttaggacctagcactgagtgtatagaactcgtatatgaatagttgtaaaaatgtaattataagttttaaatattgcattgataatacatagaatccaaggcgcattcctagacggatatagtattttatagacatagttaacaaatctaaaagttgtagttttgataagtagtggatgcagagtatgtgcaagaaggtgggggttaataaagatgaggtagttttttttttccacctgtagtaattgtggctatgaagtgtttgtttgcaaacaatacagtgggctgttgtggtgctaacatctttttttaattagtaattgtatgcgaatgtggaaagtgtagtgtatccgaacattattttgtaggatgtaactttactaagaaaacctacatcctaagtttcatgcatactacacacatcatatataaacttcccgtgggtctatctggcttgaatttaactcgataaattttatcaaaaggaaaataatctgatctatcttgattatttgaataaggtatgtgctctctgcatttacagatagacccattaaagaacaaggtttttttgaaaatgaactatggaaaatgcacggcctgactgaatcatttacactaaatcataagaactgtgatccgttcaatgcagaacttcctttctcaattagaatttagctatgttcttgacaaactgcaatataaattatccgaaggtacacaactggtgtttattatattaagagcaaatatgcacatctgccatggcattacttatggagtcttgaatggactctagtgttactgatcccagggcttataatcgtcacagtaggatacttcagcagatgagctgaccttctcttggcaatctgctccacagttgtcaaagaaccaatcaaaatgtaatttcaaccaagacagagagaaaggagagagaggaaatgacgggtgataagctcagggtgattcttcagagtgctagtagcagccagagatgaagtacaaagcagtagaacatctctttctgttgattattcagagcagcagggtaaaaagtgaaactggattaggacacattcctacttcagaaaagataggtgaagagaatatttgctgtacattcttccgtgataatttcagtttgaaagtggatggaggcacaatttaacctttgcagcatacaactcagaatagcacagtacgatgcttcactggaatgattaatttatattttgaactcatgaaacagtaaaaattgaagtactccaacacatttaaccagtctgaaccaaaatagtacacagagtagaaatcaggaaccatggtttgcagagcaataaagcatgaaaattcagcaaatatactgaatatttcaacattggcacaataacaactaacttcaaggagacaaggactcaaggaataatccctgcaagtatgttcaactgataggacatatacatttctggaatgtaaatgaactaaatttgtttggcaaaatgaatttgtcagtaacattttagagcactgctgagtgggaaaagcattcagctgatcactctgactaattatgtgggcaaaaagcaatttgagaagatggtgacggctaaacttattatcttaattcggattggtatttttttagctatcataggtggttttgtttagaggtgtggacagaaggtagcaaaatttctttgggaggcggacttaacaaagtgtagtctgttgatttacgtgaaaggatttatcaagagttaatattgtgacaaaccaaatctgggttcgtgataattaagacagttaatggagcaaatcattttagaatgattcgttgtcagattgtaaatcatgatatgtgtcactaaaataatctagactcacaacatgtaagtatgtgactgcactaccacacatccttgcacacagagtgagaattaattagtagagtggtagagcatatataattaaaatgacaggcttgagaaaaggtggtgcaaatcaacagggaaaaaattgaattaggagcaaacctgacttctttatcaaatccaaaatgagccccaaagtaaaatgccacacagtatccatgaatcactacggacagctatcagggacaaccaatctttccaagaacgtgcaaagaatagattggaaaatcacaggtatgcctgaaggatcaagtaacttttcatctcgttgtttgccacaagatacatcttgttcaccaaatgagttgcatataaaataattgcatcattgaattttgctcagtggtacgaattatctgcaatgattaagtgaagaagataactgctcagagtttccctggtacaattaaaaaatacgaacaccagtatgaaatacaaagctgctggattgttgcaaaaataacatgaataataacaaaacaggaaaaatggaaaacaaattagcgtatgtaggaattgcatagttagcaattaaaaaacagatttctagtgtttgtccataccgtgaaagatattatctccaattgttcaacaataaagggaactaaaccgataggggattatgtaatccaaataaacctgtgatgaaaccgaaggagctagttcagcgaactgtagtagttaatctgctagtccaaatattgttgtatcggaaagaaggagcagattcggatactgaaatctgttgaaaattgataactgggccacaaagaaatctgcaataatcacaataatgattggaaagagaattagctcgattggggacaaagtgacgaacctgcactaggaataatggagatctagtggaacaacgtcctagttagccgagaggatggatccagcaatttcttcatatatagaaatgacgaggattgggcctggctgcatagacagcagaggcatatgccaccagcccgtactgcatcagtgccaattcagcgaagaagaaggccatgtgctccatcagcattcaccaaaagaaatcttgagtacacgcttaaacttgtcgcttagcaatgaaatataatctggtggtaaacagaaacaaacaaaagccatggctctttacctccttgtcacttttgttatctgcagacgcagatagcatcataatgaagacatatggtgtaggaatggtgagattccactgaagcttattcagaatccccttctccattgcaagaatctgttccctagtgtatgcactatctgatatgaagatgaagtcgttcacctgcaaatacatacacagagatccaatcagaacaagtccctgctagaaatggacagtgcagagcaaaggggataaaatgttgctacctctggggcccaaatctcctcgtacttgcaatctatcagcatggcagaaacggcgaccagttgcagctccctccgctgcacttgctgcatcgagagagagatttgtggcgcacttgtcgcttgtgtgtaggcggtgccgccgagcagcaattccagagctccacgccccaggacccagccatcctcggaggccgcagcgtctcaaatagcattgaggtagaccacgaggaacttagacagccggtcgtattccttctccctctccgccaccatcgccctcgactcgctgttcgcagcagcggcctccctcgccggctgcttcttggtgcttgaatccttatttttcttcttctttataagtaacaataggacgagtaaatacttgacaagaaaaaagttgtcgcaagggcggtggaactgaaatatagtctatatcggctgtattttgtggtgattagtataaatcagcattaatgaatggtgatgagatgtaagttctgcatggaaagtaaagccaaaccaagctcaaagcaccgacagaagcaaaatatataatttgtggatatcatgatgacggaataaaacaaccaatttgagataattattattatttcaagtactccctccagccaaatttatttggcattgtttctaacgccgaataaatttgactagagtctagaggtagtacatcctaacaccaaaaatctatcaagatgaccctttgttttccaagaacttctaaactaccaataccaagatgccacaagactacatagttttatgttcgagaaaaacgactacacaattttgccctgttaaaagtaaacaaacaagaattcatatgaaggtaaatagaactttggtggcactccctgactccaataaagaacataaacatgaatataataaataagcaaaagttggttcccaaatagttgcaaagaaatgtgaaaagcaagcaataagattcaggggaaatcaaaggacagcaatccttacagttaagataatcttcaaacccaaaatcatctaaggaaccagtcagtgcctcatatcctagcatagatgacggcaatgcaccagggggcctttggaacctggcaacagataaatcatcaatcaaaacatctttcatgttagcctgcccaattaaaagcaatggagatgagttgtgcgtgctgtttttctcctatttgcagtgtattgatgtgctaattgttactagaaggggcagacaaacaaaaacaacatcaagatactgtgaattcaaccagaccaagggattcaagcattctgagtgatccatactagaacatacaaagcatcaacaaaatcttagtaacctgagcatatcgatatgtggagatgctcaaaatactacacatgcacaatattttgagaatcaactattctaaccaggaaaattggcgtatataacaagaagtttcagaaggaatttgcacactgtcagcagaatacaactgatgaccaccaacaataacatcactgatataatacgcacataggaaaagagttgcagacttgcagtaaatgcaaagagctactaccagatttacaactagacacacacacacacacacaaaaaaaaaaaaaaaacgagctaactgcaagggcaatcttaacaaacacagggaggatataaaccacatcgaattcaaatatgcatatctcgtgcccataataagccagcccacttaagtttacggacctaacagttccaacaagacatgtaatactgcctgctcagatggaactactagtgcctatctatcaacttggacagatggtggtattgcagcggaaattacatggggataggacagtgaattacttggagaggatttgggcatcaagatccttgcggatgttgaaggcggatccgtagatggcttccgcgccgaacctcttcttgtccgcccagaacttggcctcctgcgcgcgcggcggggattcagcgtgttagctagggtttcgagggcgagagggggggagaagaagaagaagaagaagaagaagaagaagaagaccttgtggacgctggcctggagcgggtgcggcggcgcgaggtcccccttgacgctgtcgttgacgccgaagcggacgacgtcgtggttcccgccgatctccttcttcaccacgccgccgctcgccatcgtcgcctgcgaagctctctctctctctctctctctctcttcactcatcactcattctttcattactcatggaacggtccagatcatctctgtgtaaaatccaacgctcaggatcgtctccacctctccaccgcgccctcctctccgccccctttctctcgctctcacgcgtccccgcccctccccaaccgcgcgccgctccccaaccctaatctctccctctcacgcggcgccaccgccgtcgtcgccgccctcgactgccgctgctccgccgtcgtcgcatccgtcgtctcgccgccaccgatccccgcgccaccaccatcgccgccgccctcgactgccgccactccgccgtcacccatcgtcgcatccgtcgtcgccgccgccctcgactgccgccgctccgccgtcgtcgccgccaccctcgactgccgccgctccgccttcgtcgcatccgtcgtctcgccgccaccgatccccgccgccggctcgccctcaaccaatccccatcaccgtcgtcgcatccgtcgtcgtccaggatttacgtcaccgttccgtcaccgcacccacacgatgatccccggcgacggaacgggtcatggtggccagggaggatactcgggcccgacgagctcccggcgtctcaggtaatgtcgccgaagacaagaactccggtcaagctcctcggccgtgaggacgcaagcgtgtgagggtaccccttttccctcaaatttaattatgtactctgttacttagttctataattcatctgctcggttagtgtcccatcacaatcgcttggtcaggattgaatgttctgtggattggattgggagttgtttgctcaaggagcaattagggaatattttagttggttgcggctgcaaataccatcagaacaacaatggagtatttaacaagagccaacagccttttgtttcagatgaattccctctgaagtcacccgtcaattgactaatgttagacaatctaccatctagaggagatcattcctgaacccaatatggtgataagccgcctctgttgatgtgttacactcattgttacttgttctgaggtgtacaccttgcttgctatattggaagagtgaatttaattcacatggatataatattttgcaatttttgcatatgaaattatatgcatgttcttgtgatgtgagaaggttaaattcctttgtgggatgcccatttaatttctggttgctaattttactgaagaatgagagtaggttatgatgtcttgggttttgataagtagggtgtaaatttatatagtacaataaacatgcgtgctggtcattctgttatgttggattgaaacaagtgatgctggcaattcaggtgcagaccagcttttggttctgtaaattattttctcaatttaaatagatcatgtattgtgatgatgtgaatacaatattatgatgttatcatgtgttcaacagagcttaaaaaatactcacaaactggattctcgtagttatacagtttaaataagttataagcacgatttgggtttgatgtcttccatttgatttttggcgctcctccctcttgctccgatctggccttagtgatgccgccctgttttcgcggttgaccccggcaccagccccttcctctggccacgtgcgagttcgagattccaagtcccggtggtcggatttctcaaccccggcactggcctcgcacaggctgcgatccgctcgccaacaaggtaagtcgttattgggatgtttatatctgaaaatttagataatttcttttgaacttcattgcttggtcaacaacataacccaggaaaccaattaaattgatagacatgttgtgtgctctcttaagagatcaacatccaaattgacatccaagttaaaagaagaattttattatctaaatcatgatgccaatattgagagtttcttttactttccgttgtatacagtttctgtgatgtgtaccgaaggttatatacataatgagattttacttcaatggtggaattgtgctctattaaaccacatggaaagttctgatttgtgcagtgataatttttccctttaaaaagtcaaatttggtttacatttttattcatgacacctgaatatgtaaaatgccatgcattagtaatgtgcaagcactttcaatgtattgtctaaactctaaaggaacaacttaccagtttattagtgaatttatgaaaaaaaatcagatgtttaatgtctgaataaattcagattctcttctctgcttcatgccttcatcaggatgaggtagttagtgttgtactgtagttgacaaatcgatttgttcgcatcgtgataaggcgcagaaggtaaggcggaaattgccttggtttatcctctccccctaaatttcctctgctgcgattggttgattggttaatgaaaaacccgatacttgcaagcagattctgattagattctaattattgggattttctagagttagtttaaggaaaagtgagttaattatcgacgatgaaatatacacttccatgattagaattatatatcgaatagacaaatatgtgtatgtattaaaaatatctgacaaaatggactgtatgattataatgcctttcaaccattgctttgtgcaatgctcattatatctcccggaaattaattgatttctgcttttgtaccatgtgcgatgtttacttttaaactgctcaggttcattctatcttattttctggtgcttctgaagcgatgtatatttcttcatttttaaactgctcaggttcatgaaatcaggcgatgactacctgccacaatgagaagacagacggtcagccgcctacacaataggctcctacactgccaccatcactgaatgcacatctggtcctcccttattttcgttggtatgtagtatgtacgtaagaactaacaagtttattcattcaaagaaaaactaacaagtttatgttaagcttcctttttaataatattttacattactgatatttagtgcagtgaaaaatgctgcaaatctctgatatttagtgcagtgcaaaaatgatacatagcttgattggatgctctttctcattatggccgactgcctgatggaattttttccatgtgaaaacaaatgtttactctgtttcaggcttgtgtagagaagaaaaggtggaattgtggaaggtaatcgcggggagttttggttcattttttgaagatttctctaattggtacgtactaattaaccaattggagttttggtctcgttactcactgtaaaaacatgatggtaaaaaaacagtttaatcctattggtactcttttatcccattgaacattttgtcgttgtgtcattgactgctatcaaaaaggaaaaacagtggatgactctttcaggaaatataggatagccccattgatggcacattttgaaccgttcatgatccctgatttattctcttgaccatattctgcactgctatacttgctaagtaatacaaatatatttatatccctgtagcatgtgagttactctataagacaattattatttttacataactaattaacatttttactaaactcttttattttgacaatcactctaagacgtatgcaattgcgtcttacgaaagcaagtgaccctgagagcactgatctttgtaaagatgcacacagcttactgcaggagaggataacaaaatagaagtctataaaaatctatagaagggatcaaatatgcttgactgaatgatagagatggaaaaatgaagaagtgatgactgttgtttcacaatgtattcatttcatctatcctataattgtagtggtgtgtcaatgtgtgatacttctagatttttccagctccattttgccagctccgtgtgtgttaatgattcagaaatcgtggaattgcttggaacatgtactttattctcaaccattttttgtggaagtgtggatgtacattgtctaatatattggtattgaagtgattaaatatgattattgatggttttgaattaatattttagataatataatatcactgtactttgccttaatatctgacctagatcaaaataaagctcaattgggtggattctaggaaacatatttttactactccctccatttcacattatgtgtctagattcattaacatctatatgaatgtgggcaatgctagaaagtcctataatatgaaacggaggaagtaacgtgtaattagacggatcatattcgggctcgatgcactgtatattagaggcagcccatgtctgactctgactcagtttcctcttcctggtgggctggtctaggctgggccggcccagcccgactgctgcatggatggccaacgagatattcgtattcggcaacagttaataaaattcttagttggattttttttttcacgcgagttcacatgtcctcacaatctatctacatactatatgtagtttgcacgaatattagggcagatatattaggtgataacaaaatgtaccatgcatgatgtttactttatatgatttttttttataagtgtaagataccttgtttatgtaatttttctatttcttatatatataaaactttgaggttatcaatttggacgtgactacacaactagtggtaactggtttgtctcactccatctatgagagatcctatccacctatacttcaaataaaattttctcttaaactactcatccgatctacgattcgattacaccgttgtgttcgtaacaattaaatctttataacaagatctcacgtgattatattttgatgaaaaattgtaaattacttttataatatatctaaattacttttagatttcactaaattacttcttagacgtataaaagtaaattaataaaaaataaaagtaatttacatatattatagagtaacttataaaaagaagtagctttaatgcatgccttttttcaatggacgtgactacatagctagtggtagccactccatctagtgtctcctttcaacttgaaaaatacgatagtgtgtcttttttaacctctttaataacttatatattttaaatcacatattgttttgaaaatctatttgcaccattgtgctccacttaaaatatgcgataaaacaagatccatattaaatatattcaaatattttattaatttaaaagtaagttattacatgttaggaagtaacttccatgttatcaggaagtaacttttacatcttatacatgattaattctcattagttactccatcaatgttatttacaatccatcaaatgttttatcttcttttcttgtactacatgaaaaacaaaagtgaaagggaaaaaacaagagagaatgcactcagtactactgagtttgtcacccttctacaatctaccactgacattgtaaagttctataatataccaccgtgttttgttcaacctctactatgtgccatcaccgtctagttaacctctgttagagctctaaaaagacctatttgcccctagcccattctacaggcatggctacctccttgttgtcatcaaggaaggccagctccttgctggcggtgggcgaccggttacagcggcgctggggacgacggttgcagtggcgccggggacgacagtgatggggatggaagcgctaggacaccggaagtggaggggcggtgggcggttggacgaggcggcggtgctgcgagcaacgaagccaggacgccggcggtggaggtgtggttggcagagaatggggagggcggcggcgctgcgggcgacggcgccaatacgccgacggtgaaggcgtggtgggcaaaggacggggagggcgctggcgctgcgggcgacggggagggcggcggcgctgcagatgacggggagggtggcagcactgtgggcgatgacgccaggacgccgacggtggaggcatggtgagcagaggaaggggagggcggcggcgcggcgggcgacggcgccaggatgccggcggtggtggcgtggtggtgaacgacggggaggacggcggcgcggcgggcgacggggccaggatgtccgcggtggaggcgtagtgggcggacgaagggaagggcggcggcgctgcgggcgacagcgccaagatgctggcggtggaggcatggtgggcggcggcgccaggatgccggcggtggagtcgtggtggctggatgacggggagggcggcgcctggtcggcggcggtgaggatttaggaaatttgggctagggttttagtcaattaatcaaagggcatttcaggcattaagagaaaaatcaacgctacaaacggagggcaactaacggtttgctgatggtgatggtacgcagtagagattgaacaaaacacgatggtatattatagaactttacaaagtcaatggcagattgtagaagggtgacaaactcagtggcactgagtggattctccaatcagtgtttaaaacagatttatagaaagttacttctgaaccatgcaaaagttacttccaattaacatcgaaattactattaaaaattgttaaacttacttgtactgatctgtgctgattaaatttaatctctagatagagtcatatttttatccctacaacgaatttacttctaatgtcgtgacaaaattactttcgttttgttttaagttacttttataatttatgtaaattacttttagagttactaaatttacttttatatgtctaagaagtaatttagtgaaatctaaaagtaatttagatatattataaaagtaatttatattttttcatcaaagtataatcatgtaagatcttgttataaagatttaattgttacggatacaacggtgtaatcggatcatagatcggaggagtagtttaagagaaaaaattatttgaagcataggtggttcctatttgtttaacggcagtgtgatgggaggaaacctccccacgtccgtctctctcattctctctctctttctcggacgcgaatggatgaagacgatgacgtgtggtgggatggctgggacgacgacgtgcgaatggatgccacgtcaactcgcgcgggatggacggttttcccggcgtcgcgcgatagcgccagatcgagaggcctctcgaaatagtttttgtgtatcaaattaccggctcaaattaaccttgtttatataaattaccttgtttatgtagttttttatggtagtatatatatcattttggaaatatcattttttgcaagatgagaatttggtgatataatagatgtattgttttctcttttgactaaatatcatgttataaagaaaataagggtcagagaaataccatgcactaaatgccatatatgattgttattgaaaaaatttatttggtaaaaaatgcaacatacatattatacatattatgaaccaacctaatcttttcttcctatagtaaaacattcatttggttatggttaggtatatttgtaacacgaatcttggaacacatcaacggtgtagattgcaggcccgagtgcaaatctgcatacaagtcttctcatgtacacaccgtataaaccaactaacaaatttcaccaaaacatctagaaaaaaaatagtattataattatgcgcaaagtcttaacctcaaattcattatatttaagccataataaaaaagataaaaattctgacagttttgagagcataaatacagagtatgtcaaaattttatcttttttgccgctgcctatacatataatgaatttcaaggtgagacttcacacataaatgtaatacttctgaaactacatgtacaattttttttaaattttttggtaaaatttgttagttggtgtgcatggtatatacgcaggaagacctgtgtgcaaaggatacgtattacatggtttatcatactattcagagtactgtatttaagatctttagaaaaacacatcctacttgcgtaagctagttaggtgcgagatattgtgacaagcaaatgttggattgctcaattgttcacatctcacatttttttgattacttgccacttgccagccatgcgattgacctcgcttggtatctacgtacaacacctgcaataagctctcaggaacgatgcttcaatttgacttaggcctggtttagttcccaattttttcttcaaacttccaatttttccatcacattaaaactttcctacacacacaaatttctaatttttctgtcacatcgttacaatttcaatcaaacttttaattttggtgtgaactaaacacacccttagcaagagcccaagactcacatgccttggatcagcttcaaaatttctcttcttcattgaatttgcgatcgtcttgttgtcagtcagaaatatggtacctgcaaaatcaagaaatttcgccacctccattgccagttgtcgagccagaagttcagcatgtagggaatattgagccactgtacttgtaacttttaggaaaatagcattgcatgtatttggcatgtggaagaacacccctattcctgtaaaaccactcaggctacatctacataacatctattttcatttgggatcactggaattcattctccttgtggactcattgtcctgctgcaagtcttgagttttctgctgagaggaatatctagcataagtgtctaacatcgcttcagctgcaaaacaaacttgagctgattctttgagggttcactgaaatttaagatcatctctggctttccataaatgccacaggataatgagaattcttttgagggtggcttgatgaggacaattgttaattatgtaagaaataatgtgtgcaatagaaacattatcaagaaagatgtcagttgaaatattgatatcagaaatgcgccaaaatcaatttactaaaagagcaagtgataatcagattccaactgtccacatctgcaacaatcaggagaaatgtcatttattctgaagttcagtctttgagaagagggaagagcttctctgagcagcctcccaccaaaggtcttcaccctaggaggaatcaacttatttttccagattagcttcattaaggaaagggattgagcactgacctggttagtgttttgattttctcttttaactacctccttataagcacttttggtgttgcagattccactagaattatgtttcaaatagagtttgtcttttgtctcctgctgaataatttgaatctccacaattttgttaacaacattttcttcagaaatagaattcaatttcggaatatcctgtcaggggtccataagtatatcatcaagtcaatcaagtggagtaataaccaaatagtaaccgttactgtctctcggggaaacctatgtggcctgtacggcgacatcgtcaagagggcgaccctggtacgagatctcatgacacccatcaggccatcacatgatagccaatatctggagggggacccgtacaacctccatcgccgctacttcctggcttgggccatacgtaagaaaaattaaaggccctgttgcgaaacataatatttttttcagggaaggtgcgaaacacatattgaggctatatatagaaaataccaagaaacataagaataaattagtgttggtgctctacctaaggaagaatattttttttaaatggatgttggaaaaggaatcatgtcaccaagtagtgatttacttttttattaagcagaaaatggtatcataatttaaagaaatggtaggatgtgtgtgtaataccgataccgcatctttttgagtcgttctaaaatcgaatttaatgctgtcatgttggaacttagagcctttttcctgtccttgaggggaggagttaccatatcctgatctggctaaatcggacggctaaattgctcggtaccgggtggtattgtgcccccacaggaggaggtaccaactgagatatggtggtgtgagggtagtattgtactttcgcatcaaccctttctctcgatccaggccaacgaaactccccgccttcctctatccctcgtgggttcgttgagtttgctcgccgcttccccctttcttctcctgccaaatatagccaacagcaactccgccaactgtccccttccgctcgttgctgtcgcctcctcctctactcccgcctgtgatttgatgccatctccactcacttgcggccgagcgcggacatggacaccatctcttctgctcctgcttgagggccgacactgtcggccgccatctcctccgctctcctcatcctttggtgctatccccctccctacaatggctccactctgccatcccatccaccagatccagccaacacgaaggttggagcgccatatttggccaaagataggtttcctcgagcttgcaaggaggttggcggcgaccactacgaaggtggcagggagccatggaggtgtagggcgatggcagtgcggcagtcggtaggaaggctcgctgcaagcaaggctcgagcagagcagaggagcaactgcccaaccctgatttctgaacagcaaacaaggatatcatgttttctcaattttcacatgacatgttctctcgttttctctacattgatcctgaactaatattttattatttcttgtgtttagcatgaaatttttattatttctattatgtgcgtctttctcctatccagcagacaagggaaagcatacgagaaatccagagtagtgcagttgatcctagaggatctaaatcaaatgacagcttctagtgttcccgcacatacatgattatgctgcacatatgttccttcatccatgatcgagtgaagatccccattaatggttctcacccgacgaccgaccttgtattacattgtcttgctgttccttttgcctctttagttgtttcattatttggtgttcataacttctatgtgatcgatctggtctgttgttctacccaatgttacgaaaaccatttgttatctttaattgattaaatagttccagttgtgctttgtcttttaacattcattaatatacggtttcatattccacgttgagcatgtgtaatgttaatacatagatatagttaatgcttccttccgcgcgttcgatgcgtgccctgtgatcatgctctcttggaaaacgcaacaactagggcaccacgatacacatgcatttactcctagtcctactgctatgacagagccaaagagaacacaaaaggctactcttccaaacaaaactaattatccgatatcaaggcacgatgctaaatcacattagttgttgcaaagccatgacaataaaagatagagaggatgttctcccaatgacctgtagagtgaaacggagcttgagacaacaagttcttccacctatataatttttttagggactttcaattttcgttcgttataaatatgtaacgggaattttacttttggtatatcattactatcccccaatgttctgggactatcttcatttagaaaaatatatcgcagcccatttgagatattctacaggaccgggacgacgatctaaatctttttcttttgtcatctgagaacatttttgaaaaaaaaattaaaggcctacattagataatcacatgtctttggattagctagaacaagataatgctaacctacacattatggaaaccgaatgttcatggtactgtttagcacatcaagcaggtccaagttgttgtttgccagtttgtgcagcctatcaagtaaaatatcatcgcaatagaataggtcgtgttatacgtgtatggcaaattaggtaacagattaatggcgctaagcttaattcatgacatgactgccatttaggctggaagtgtaacaagaaagcatattcttacaatccaccatccaaataaaaagtgaccagtagatacaacggaggacatagatatttatttgaattatttaaacgcatgcacgcatgccatgagaacctcatcactctctggtcataaggaacgcatctctagcaaccaaagatgacaaacatgcatataattagcctcattggtggtccatgaagctctcccagccccatatatatatatagctcctttgctatcatgtacgtagtatataacatgagcatcagggtaaggaaagtcatctcaaatccacaccagttaccctcaatagaaacggtgctaatggcccagaacaagaccatggctctgctccttgccacccttgtggcggtggttgcggtagtacgagccaccgaagagaaggatatagaagaagctgtgtgctcagagcattgcaacgacgaggaaaaagaaggcaccatcgaccacaagcactgtgtagacatctacatcctcacgaacagggaactttttggggccttggagagaggaatgaagccctcgatggagcaattcagcgctttgtgcaatgaggggtgtagcaaagaatttaaggaggatcctgccaccaacaagaagtgcgtagacagttgcatcgtcgatgctaaggaactcaatggacacttagcgaaaggtggcgcttctagtgttcccgcacgtgcatgattgtgtcgagctgcacatctgttccttcatccatgatcgagggacgatacccattaatggttcccacccagcggtcggccttgtattacattgtcctgttgttccttttgcctcttcaattgtttcattatttggtgttcataacttctatgtgatcgatctggtctgttgttctacccaatattgttactaaaagcatttgttatctttaattgattaaaatagttccagttgtgctttgtcttttaacattcattaatatacggtctcatattccactttgagtacgtgcaatgttagtacatagatatagttcatgcttccttccgcgcgtccggtgcgtgccctgtgatcatgctctcttggaaaacgcaacaactagggcaccacgatacacatgcatctactcctagtcctactgctatgagagagccaaagagaacacaaaaggcacgaggccactctaaactcttccaaagaaaactaattctccgctttcaaggcacgctgcttttgaatagctacaaaccggtaccctcagtgatgatattattcatgtttctctagcgtataaaatatgtttcaattcttgccttgacatgttgcaccaatgtgttgcttcgatgagtttataggtatgttgtttcacgaatacaatatcgaagattccgatttgaaaagtatagcttttaagtgcaagattgaaacaatctttttcctcgttagagaacaacaccatattaaggcaatataacacatatatttgatttcatcatttttttaatttttgatattgggccagttgaaaataatggatcatgttttaacaaattaagctaaacattttgtttcgcaagcctatacaaaagtttaagaaatgtgagttttagtacataatacaccattgtcgtgtgatgaccggtcaggccatgagttttttttttagggactgaaagttatttaattaatcatttatagaatttatattaatgtgcaagtcatttgacatgtaaagtaaaggagggaactaaactttccttgaataaaccatgtttggagtatttttatgagattcgccatccctaaaatattgtctgaaattttctcggaactcaaccttaaattttaacgatgccaatggttacgccttttctagaactctttggccatatagttacatggaaaggattggtgcgtctagctagacatatatgctaacatctgatggcatgtcgagacaggtgcacgcgtacagtcattccatggatcgcatacaatagctactaaatcacattagttgttgcaaagccatgacaataaaagatagagaggatgttctcccaatgacctgtagggtgaaacggagcatgagacaacaagttcttccacgtatataatttttttggggtctttaaattttcgttcgttataaatatgtaacgggaattttacttttggtatatcattactatcccccaatgttctgggactatcttcatttagaaaaatatatcgcagcccatttgagatattctacaggaccgggacgacgatctaaatctttttcttttgtcatctgagaacatttttgaaaaaaaaaaattaaaggcctacattagataatcacaggtctttggattagctagaacaagataatgctaacctacacattatggaaaccgaatgttcatggtactgtttagcacatcaagcatgtccaagttgttgtttgccagtttgtgcagcctatcaagtaaaatatcctcacagtaaaatacgtcgtgttatacgtgtatggcaaattaggtaacagattaatggcgctaggcttaattcatgacatgactgccatttaggctggaagtgtaacaagaaagcatattcttacaatccaccatccaaataaaaagtgaccagtagatacaattgaggacatagatatttatttgaattatttaaacgcatgcacgcatgccatgagaacctcgtcactctctggtcataaggaacgcatctctagcaaccaaagatgacaaacatgcatataattagcctcattggtggtccatgaagctctcccagccccatatatatatagctcctttgctatcatgtacgtagtatataacatgagcatcagggtttggtagttctcccctgttggcagatttgcagtgtttcggttttttattgtttcgggggtctaaatgatgttttctgtgaaagtgtataactaggaattgtagaaaattcatagatctatcttctgaccaaagggcgtgattttatcttaagtggtttagtctatatgaatttttgagtatggctattgtttttatgtcataatctggacattagtagattgaactgtttttggaggggttaaacagtggaatcagtcaggacacctatagacaaagttgtagagttttctctaagctttccatattggtaaagtacactttgatcggatgagtagaactccagatatagttgtttttgtgtgtaccctctgaaattctggacagattctgaaacctgttttcaagcgcaaaatagaccatttaaatggcagaataaaaatatgctttctacataaaagttgtaggtatagttctgtagatttccaaaatgtatttatttgcagtcatagcctatttatattttgagatataaatgtttgaatcagcagtgttgtttatagtccgagcggcgttccttgtatttgcatgttaacgggctggggccgtaggggcgtattatttatttttttatatgcatgtttgagtgtatattctgaggttgtcttgtgaataggtggtggtgcttcggattatgcttggtatcgtctcttcgttgttagaggtaagtaaacatagcggtggtttgctacagctttaacctgttattttattctaccttcactttgaaattatatatcatcaactgagacattattatttgttacacagaggatttacctatctgaatcacacttattgattttacactgtatatggttatactttacgctcttgattataatacccttatactgatctccatcgaaggaatgtggttctgatgttatactctggaattcatactgcatttgcatcacttgcattgcatttgaagttatgtcgtgaacctatggttgcgaccatactggtacagcatcgtatattgccgtaatacgatgcagcttcacaccttgttgggtgtgaaggcaggagtacatatcattgcattgcatatgcacttattcatcctgttgggtgtgaaagcaggagtacatatcattgcattgcgtatgcacatattgcaggatgttatgagaattatcgatcgaagatatctttgagaagtgttttcttctctgagatttgtgagtatatggatttgattggtgacgtcacgatatttttcgtccatggatattcaacttgtctttacgtgaatcataacttagtatttaattaactatacaatccacttgtggtttaaatagcttgataaagccgtttaggttggaagtgtaacaagaaaccatattcttacaatccaccatccaaataaaaagtgactagtagatacaacggaggacatagctatttatttgaattatttaaaagcatgcatgcatgccatgagaacctcatcactctctggtcacaaggaacacatctctagcaaccaaagatgacaaatatgcatataattagccttattggtggtccatgaagctctcctaaccccatatatatatatatatatatatatatatatatatatatacatatatatatatatatatatatacatatatatatatatatatatatgtatgtatgtatatatatatatatatgtatgtatgtatatacaagtatatatatgtatatatatatatgtatatatatgtatatatatatacatatatatatatagtatataacatgagcatatgggtaaggaaagtcatctcaaatccacaccagttaccctcaatataaacggtgctaatggcccagaactagaccatggctctgctccagtatgagcactgacattttgaccttcatgatcactggaagaaaccaggtctgtatgagggaaaagaaatcaaaccgagtctttcagaaacaaaatatagaaatttaaacaagatggaataaattacatgttttgttacacatatttgcatcaacccaagcattttgacaccatcaaacccaagcatatgtgaaaattctgctgcataatccagtgcattatcacctgctatagttttccaatccttgaagatccttcagagaaccagaaaataggattatggctgttgcagttaaaagaatttataggttgctattgcagttaaaagaagtaacacgctgaaaaatccatagaataattaatacaattttagaggcaatataaatcccaagcatactctgattttggcattcctttgccgtaagccttttgaacctcactcccaacctgaaaataagtgttaaaatataaattctcaatcaattaactgtggagggcctagaaagaattacaaacaacagaaaaatattttttttgttaatttattttgacatgcaccatctctgaattaaatataccttcaaataagtggcaacagaccatgtttttatttcagatgagtgatatgctacaaactaagaaacaagaaaagaataagggtaactgctacctactgccatcactcatgtggtaaactgtcatcgaatgagtagttacagggagaaaatcaattgctagatgagggagagcatcaattgccttatacacatgatctgcatcagtttttagcaaacaaaacctgcatctgtaattctgtatcataagtcaatcggacgagagctaagtagacaagtgggtaagtccaaatctgtaatgtagaactcctctgaaatactgtacttatcaagtgggtaagtccaaagattgactacacaagaaactcaagtcaacttatcaaagatgaatagttacaaagtatatatcattctcaaaggcaggattaagaaaattcaagttactctatctatattcatagccataacctgcaaatactttactcctttgtccatataacagcagctccaaaggctgttgtctggaagaagatgagaaaagaactaaagatgtgccccatacatattatatacaatatcagcattgaagtaagaatcatatgctacatgctctagaaccttaagaaatttcaatgttgtcatattaatcttcctcagtttgtatttgtttactgatttttgttcctatatgctacagtgtttgaaccaactgcatggtttctgtttcaaaacgtgaagggcatatctccagctccacatacctatattagtagtgcatttgtaaataattggcaatatttcagatttggacttccatagtcactgatttcaggttatggtggtagccctttggactatgttattgccaggcagtctacatgtatcatctgaaaataaaaagctgataaatcagtagaaatttcatgaagcatacatttcataccaattgacaaactcagtcagcaactcagcatggcacaagcctggaatcgggataaaaaataaagttaagacacggagaaaaaaagtaagataaacatagcaatatatatatatatatatatatatatatatatatatatatatatatatatatatatatatatatatatatatatatagtccaaattgagcaggaagaggataataagccatcagtttctttctaaatggttcctatgcttacattgaccttgttttatcagaatttttgagtggtactgatgaggccattgtcgtgtcttttcgcacgtcgccgtcgtcagatcatggctcgccatcgatatcccaggcttgctcagaggacgccatagggttctggaagcccttcctccaccagttccaaaggtatgctcatcgaaagctcgctcttgactgcgatttggttactgattttgatctgttgtgcattgatgggatggaagaggaagatgggtcaggggatctggggagtcatgggctcgttttacggcacatgaataagtatagtattgggatacatattctttttacaacgttgactaaaagaatagctatggtgatttgcttaattaatcacttgtgaatgccattgttgtatgtatcaattatttattcacttctgaattacggagtgtaatgatttctcatggattatcatgtattttgcagacaggaggctttagtgagaacatgattcctactgtatgattcaatatgagaaaggcaacaaaagttaatgtcacaataaaattgtgggatcttggagactccggagcatatgtgggagagatattgttgtgaagtttctgcaattgtgtaagttttttttcctgtctacttactaatttggtgcatgtgcagcaggaatggcactatactaagtagttgtcatgcttagtggttgttggttacacatgccaaccaattgttttcatgtcattttgatttgacctctgctgaaatttgggaagattttgtaaatgtaattactttaaagtttcaattttgaccccaaagcagtggaggcacttaatttacatttcagcttgttagaaataacatttcacatttcagtaggcgagagcataactgccctcctaattgttcctgatgattcacgcagaatgctaaggtggtcccttttttttcaaattgaatagttatattattatctttttaatttaatcatcacacccttttctcttttaaagtcatccaggattattgggacgggaacattaatgtggaacaatttttgtagtggagaaagatttcactgacgagaatgtcacatttgagaactcacctccccaggtgcttagttttcacttgttccttttgtttttactaaacttgttcgtgttccatagagagatgcctatgcgatgagtgcaaaaagctgagctaccatttgtggacttgtggtgcagcggtaagggcatacagatgtagtttgagtaacaacagatagatgtgccttctacaattgcaggtatgctcatccgttcaactcttggttaaatcacttcattatttaagataatacaccagcattacttttgttaatttatgagattttgacttatgtccaattaataaagaattcagggtacgttatatttgcactatggcaaacaataagtttaatcatttttaaattgttgtgtttttctccttcttatgttatgcttggatggatgaacacattcaggtgatattattactggaagacgagaaatcggattatgttcctaggtcgtccatgggaactatttgggaggcttgcgtttgcacacaatttagtgtacacctgagtccaaatatttcagggaagttaattgttaaaaaattatcactgttttttcatgggtgtcaacataaaattgccagagatttatacatagatcatggtaattaaggttggcaattctcaatagactgatgctaatgtatccagtcttgcactttggtcagtgacattcacattcctttgtagcacttcctgtcttcctgcaaattcttgagttgtctttcatgcagaaaggtgtcgatacttaaaagttgatgttttgcctctggccatgacagattatgtgtattgcttgtagtcttttgtttggtgaacaaagtaatctctagaattgtactgattgcactcgcagttgtgaacttttgttctgaccatgtatgttttcatgcatagagaaagaagaaaatctgtacctacttaaaaaaaaatggaatacttctattcacatctcgtttcgtcagtcatccgtcttggtagcgcccgtttagtcctcttgatgtgtcgtgagcgattggagagcaacaaacaagagctgtttttcttcccagtttgtaatggggatttttctttctcccttggaatgatgggaattggatatgtacatgatgttccgtacttccgttccacacttagctaaaaacacttttcagtagtggacgaatatttaccacagtgtggatttggatcccagggtagcgactcgatagccagtccacgcctaaccaaaatgagccatgtttgttttttcgtggcaacgcataggcatgctattatagaaaaaaaaaatttgaagacgagtttatgaagtcggggtcccacatgtcatatgtgcgcccgttgtttttctgtcatttctctggttactactgcacgaacacggaccaactctgttttctcctttctctgttaccgcacggacacggcccaactccatattctccttccgtagaaccaaccactgtaatatctcctgtaattttttttacggtgaatcttaaatcttctttattatatgcttcgttgacaaaacgtatattgcattttgattatttgaattgctttattaaatatttggatatgtttgatgttcaaggtgttttgtttgtgctttattttcatagtagtcttctatctatgttgtcttttcatattcttataaacaccatgagattggttatttaacatattttcacctgatataattttgcatttcccgtggcaatgcacgggcaccctcctagtatacaatcggttttgttattcctataatttcaagcttcatacagtgaactaagttagttcctttttttcatcacaatactacacctatagagtacccaatatgacaatgtattagaaaaactaaaagataagcagtgcacccacaaactacttcattaactaaacatgaccaaataaaaaagggcaaggaaggcaactgacatacttgagaaacattcttgctgtcctcaggataattaaaagtagagtaggatacatcctgattaactcatcatgaacatggagaatgattaaataaaagaattcgaggaagcttttcaacaatgtttttatgtcgagaacataataagacaggaattcaactcttcaggagaccataattaagtcagcgatgacttgggatatcaataccaatggtgatcatcaccataggtaacacagccacatatatatacggttttagttctgcgcacaatttcttggaagggtagataataatactaatccagtaaaaggaaaaggcttactttcattgtcaggctgccatgaactgctgctgaagatcttctattgcagctacctctttctccccagctgtatgtcacaaacaactaggtaaatcacacgaatctccacagctgtatgtgcggtgaatcgagtgttgagaggtcgcagcgccgatgccggcaccggcggcgagtcacccggccgggaactagtcacccacgaggtcgccggccggcggccaggggttgcagcgcgcgtgagattttttttttttttacttttctgctcgtttttttttcgctccatccgaggaagggataaggtatatatatattactgtaccgcaccctaataactaaaacacacccatcacaccctacacccccacccctatacctggccaaatgggccgtgccaagccgggccggcccaagcacggccgcactgtagaaggcccaggcccggcacagcacgccggcctgtgggccgtgccggcacggcccgtttacccgtgccgtgtctgggccgacgccatagcccgtgggccagcacggcacggcacgtttactgtagagggctggtacggcacggcacggcccgcgagcacggcacggcacgggagcggcctagggtaggcacaccgcgcacgtggcgccaagcggccgagccaccgagggcagccgcggggccaggcggcgggaagcgcgcgtcgctgcgttcgcgcgtggcgcatggcaggcggcgtcgcgacgtgttgctggggctggtaggctgggtcgctctcgctctgactgcctccgtcactccgtgcctcgttgcctcgttgggagcagccgagacggcgacaggcgactcagcgagaccccgtacggcggccgaacagctagtcaaacgacgaatgcgagagtgccacgtgtccccaacggctagtgagctaatccaacgaccgctgtttttgagaagtagccgttggagagcaaaaaaatggaaaaaaaattcgaaaaaaatatgaaatttatttctataaataggacacccaccggagcattctgaatcatccatacctcccattttgtgctctgttgtgctctttcgtgtgatagatcgattttttgatttagacaaaattttgtctaaaatcaaaaatagtttgtgactaaaaatagtgcatacaagaggtgtaaagccaagcaaaggtggtaagaaagaagtacgtcatatattcagttttatgtattattttattttatgttatgcgaataaatattctgaaatttgtttatgttgttttaaattttcagaatggacgaatcgaacattccatcgttcacgttaggtgatttcgaccctaactacgtgtcgaggtcattcccaactggtgagtatgatgccaccggatcggctccaacaccaccagttatggagccaccggcgggttcagaagcatccggcactatgagtgggagtgcatcgacgaacaccggctcaaagagatcaagaacttccggtgtttggcaacatttcgatgaggtggccatgacaggccctgatggaaggcaggtaacattcgcgagatgtagaatatgcaaaaataagttatctgcaaaatcatctggtggaacaggacatttgaagcggcatgccgaggcttgtgcaaagaagcaaggaatccaactacgacagcaacaactactactaaatcctgatggtacggtacgtacgtgggagtatgatcctatggtagctcgagaaaatcttgcccgtttaattgctagacaagatttacccttgaactttggtgagagtcctgcatttgaaaattacataaaaaattctcataatcctaggtttcaagctgttagtagacaaaccacaacccgtgatttgaaaaatgtctatgacaaaggttatgaatcactgaaggaattatttagtacatgcaccttttctgtcagtgtcacctcagacatatggagtagtagggctaaagaggattaccttagtgtagttgtacatttcattgatgatgatcggcaaatgcaaaaaagagttcttggcttaaggttaattgatgtttcacataccggtgaaaatatagcagagagaattcgagaggttattgatgagtttaaccttgcagataaaatttttgctgtaacaatggataatgcatctgcaaattctagggccatggaaattctacaaccattattttgtatttatgctcaatcatttcttctgcatcagcgttgtgcatgccatatcattaatctaattgttaaatgtgggtttaagagagttaatgtacacatcgacgctgttcgtcaagcaatcacgtggttaactgcttcaaacccacggattgcacagtggaaaaggtattgttgtgcatcgggtgagcccccacgtaagtttttaaccgatgcagaccatcagtggaatgccacttattttattttaaaggttgtattaccttacaaggatttacttactgttttccttcaaacacgtaatggcccaaaaaacagtgacggccagccaatactgactgatcatacctggcacattgttgaaaggttcaatcaatttcttgaaacgtttcatgactgtactcttctgttatctcaagtatattatccaacagctaatttaattttgcataatattcttgaaattgccactttgttgaaagagtatgaaaatgatgaccttttaatgcccgttgtctttaatatgaaacaaaaatatcttaaatattggaaagacatccccatgttgtattcttttgcatttattcttgatcctaggggaaaattacggggattcctcaatattctttcacttattggagatattattaatgttgattattctacctattatgctgatgtcaaaactaaattctatgaggtattttgaaagtatgaattaaagtttcagggagatcgcttgcaaagacccccacctgtccctgcagcaggtaagaaaaaattacagtggagcagaatttggggcggttcatcttctagccatggtggtggtaccagttcatcagcagcaagtggggacgctagatcgcatggtcctgccgaagagttgtccaactatttggatagcgatgccatcaggcatgaaacgtcagacttcaacgtactcgggtggtggaatgatcataagatgtcatatcctgtgctatcaaaactagcacaggatgtgttgacggtgcccgtatcttcggtatcctccgaatcagccttcagtctatgcggaagaattatcgaggataggagaacaagtctgagcagcgatcatgtggaaatactattaagcgtcaaagactgggaacttgctgcagaacatacccaatacactgctgacaaccaagaattggccgcacagttcgaaaacctttatttagatgacgaacaattagggtagctagtttatattttttaagtattgacctgttggctgtactcttttctttgtcatggttttctcaaatatgagtttttacatgacaaagtttttaacgaggcagcatgtatcatgtaaacatcaataaaggtcattactctttttttttcccatatttttctaatatttttctaagtctaattatttttctatttttctccaactatccattaattttctcttagcttagttaactttcggacctttctctttgatttgaattgttccactgacagagtgacaggcgatagacacacggacagaggcaagtcactgagtcagcattcagcaagtccagcgccacgtgtcgcccttcggccggccggtcccgcggccccggccgctcgctcccgcgtgccacgtccaaattttcatccgcgcgcgccttgtcaccttgccagcttgcctgcagtcgatcgtgccaacgggccgaccacgacccatgggccattgacgtgcccgtgccggcacggcacggcacgatgttccctcgggccgtgcttgggccggggagtaggcacgtgggccggcacggcacggcccgctacaggagttgtgcctaacgggccgtgccctagcgggccgtgccgccagcgtgcccgtgccgtgctaggccgggccgcccgtttggccaggtatacccacccccctccccccttcccgctcctctcacccaaatccaatggcatagtagaggtggccaaacgggccaggccaaaacgggcggcccgaggcacggcggaacctgtagccggcacggcccggcacggcctgctacagtaacgggccgtgccggcacggcacgagtagccgtgccgtgcttgggccgccggccgagcccgcgggccggcacggcacggcacggctactgtagtaagtccgcatctcatccttccgcaagtccgtatctcatccctcccaactgacggcccagcccgctagccgcctccgcaagtccgttgagcacccctcctagctgatggcccagcccgccagccacctccgcaagtccgcattgcatccctccgcgccatttcggttcctgggccaaccgtgccccgtccacggcccatttttcattcacgggcccgtactgacacggcgggccacacgcatgccgtgccggcacgggcacggcccggccatccacgggccgtgcttgggccggcggctcggcacgtgggtcgggacggcacggcccgtttcatgagccgtgcctaacgggccgtgccgaaacgggccgtgccggacccgtgcccgtgccgtgccgggccgggccgcccgtttggccacctctgtggcatagtaattttgttactatcgtctgtccatactatttatactactcggtggccccactatagaaaccgcaccccacttcttccccaactctccattattttcggatcgaggcccaaccgcagccggccaagccgctccgcgtcgtttccatcgccgccgccgcggtcgtcatggccccggccgacactctgaggcgggggcgcgtctcggtctccgtccgtgcgtccgccatggcggtggcgttggcaccgagaaggaagacggatccggtgggcgacgagaaggccgtggtgggagctgtgggaagctgctggcgtgcctccctgatgccggtggctgtgggagccggcggcgctcccatcggtcactggaggaggctcggagaagggctcccttcccaactccggccatgaatcggcgacggcaccggtgggatcttgtgaggagggggctgtggttggcgacggcataagggagcggcgggcggacgacggcggcctacaagggctcgtcaggccatcccccgcccggatccggcggtgggcgtcgtctcccgcccggatccggtgacggcagcggtgggcggctcgggagcaaaatcctagctcccgccgtcgccaccctccttcccccctctcctccacctccccgtcgtcgaagcgcgtcgctgggagagccaggcggcgagccgggatggcggtggcggggccatcttctctgcctccccgcgccggtggatgaggaacaggaggggatgaggatccagcgacgactcggcgacgaggagatttgggcggtggatccggtgatgtcgaggtgcgtgggcgccggatctggcagcgtcggcgtcgtccttcgctctgcctctgcttcgtcgactactcggccggcagtggcgacgtcgtggaggatgtcgtctccagctagagggcgtccacccgtgaacctgcgacgggatgggtggggatggatcagcgcctcgactgctccttggccgacgacagccgctgccctgacgacgtccttagccctcgtcggcggccgccgttccgcctccatcacccacttctgtcaccttcgtccgcgcgcggctgccagacggcgaggtgaggagccctggccctccttcccaacctctgcgccgccccattgagctccatcgccgccaaccaacctctcatccccatctcgtgaactttgcagagatgaattaattactccatagaggcagcagtagacataccgatctgatattctctatatgctgttcgtttattcttcttctttatttgtttttttcacgattttttgtagggatcaagcatcatgcatggtaggcctagggtgatttgttcgctatgcattcagtacatccttttcctcctcatatctaaattttagtttgttcagtcatgaaatctgtttctgacaaaacgcttgtgattgattttttttcccatttcagttgtgacctatgttcctggactgctcatgtgtctatatagaagattgcactcagcccctggatcgcagtagaatcttccttgactaagcttaattgtctattctttgggtaagaatttcttaactgaataacatgtatatgtgaaataatcatatgattgttgagaagaatccagttcatttgcatattttcagtagtgaattcatctctgcaaagttcacgaaattggaatctacaaccaggatatattttgtatacaattatgagattgaggacctaatagccgccagtggtggtggccatatacaatttctttttatgttattgctgcttttgtagggatcaagcatagtgcgtgaatagtcctgctgccagaatgttgtttttcgatgcattaatcacataattttcatgctcatctgaattttcaggtgtccagtcattaatttctgtgtgccctatgttgggaaaactgctcccatctagattttaatttgttcagttgtatatttgtgtatccaatgctgtctaatactattcatggatggaaactcaacgagatcgatttgatagcagttctctgtaattggttcaacagagcagatcgtttgatttgttctgaactgcgctccatcattgcttttccacattgccataaatcagtacatacaattgccaacactatcatctaggttcgcagtgatgatttagttcctttctatcccccagtgtgtgaatcttgattgatcttggttctgatttcactgaattgcgcaatgtttgattgcaggttgggacaaggcgcacctaagaacctgacctccgcacaaaacttgtaaggttgcaggcgcatgcatcatcctcggctataattcgtcttccgccgatgcaactagagcagcgatgactagtgttttaattgtacaatcaatatgtatctgtgcctgagtctctgtaacatgtgtgggttttttactcgacaaaaatgtttgttttggctatatggatttgttggtaaataggatactctatggtcaggtagtattttatctttaatgagaaggttcgagcaatttgtggccaaagcaatattttaattctaacttgagattaattactgatagaagtcgggctataaattatgtctacgcgtagagtaatttatctactaacataagaccaccagaactggaacgaaattcttgctagatcaatatgttctctcaggagtaatttctttactcaaaagagaaaaccaaggagtggaatggatcaatatctactgtcgatagtaatttctttacttagaagccaatacaagggtaacaaaccgggagtaatttatttacggaggaaaatttctttacaaaccgggagtaatttattttctagaaaggagtaatttatttacagaagaaaatttcgtggcaagattaatatgttgattataagtaatttatttactaaagagaagagaagcagtggaaaaaaaaaagtggtaacggacataaggggtgggtggcggttggtacggacgggagggaagtgggttgggggtgccgaccctagggggtggggtgggggtggggagggggggtggtggggaagtgggttgggggtgccgacccttcctccgtcgaggttcgccgccggagcaccattcccgccgtgcgacggtgagagccgccatgtccgccgccttcggccatggtttccgatcgccgtggttcatctccctccccctaatctctctcttttcctctcttagggcctcccggagctcgtccgcccgccgccgttgtcctcccgtggctcgccgtcgccgttcgccgtcgtcctcctccgcgccggccactctcggtgaggcatccctcctcctctattcccctccctctccctcctagccgcgccgggtcgagccgccgccccggtcgtcgccgccgcctttgcgccgtccgctgtcgccgcccttgccatggccgggcggccggctttgtgccgagccgagccgagccaggtcgccgccgcaccgtccgatcggtcccgggccgatccgggccgtcgatcccgtggaccggctgtggaccacccgcgtggtcccggtccacagtagaccggcccccgtgcgccactgacatgcgggccccgcctgtcggcgccgccccctcttgatgacgtcagctctgggatttattgcgcaataaatgatttaaggacttttgttatagtaataaatacagtgaatcttctaaaattcataactaattcatccgtgttccgtttaagcccattcaagtctcagtaaatcaagaaaaatgtgtagaatccattaaaaatggttttgttctctgtttcagtagtcttatagcctgtttgtattgtttgctttgtatgtcgcttagattccggttcttccgacgctccggtgtacttcgaaatagtcgccgaggttcctccagcagcagagcaaggcaagtcatgcttgtcacttgaacatattgatcctatattgcaaatgctctattgtttttcttcaaatattgcattgttttataatgttactatgggatgtttacctattgtcatagccatgctattgttgtaccatgttcctttgttagcttgggttataacatgaatagactttggactaggaattgcttagccatgcttagttcaactagcacacaatggagggagatcctattaatgtttggactgtaggttctaatggtaatgttggattagtgtcaccgcttcggtgttggttaattaaaataaatcacatggtgggctatgggtggatggttttgttggtcgcgcccatggcagttaaggaccggttcgcgggatgccctggaagaacttatcgtacttaccacaagccagcgtgggcaacgcttggcttgtagtgtagctttcctctagctgacgcatccaggcaagggtgggcgtgatggagcggggcgggccctgcgacggcctctgtcgcttccggattcaccttggcacgagaggggactgcccgctgccttgcgaggagtgggggtgaaacctaaggtgtggtgtacttggttaaagggggttatgcgaagggtcctgtcacggcctctttccggtatgtcgtggtggcatgtcggcacacggaaacgtgtcgtggggctgtgtcttgtgggtacagttgtacacctctgatcagagtaaaactattcgaatagccatgcccgcggttatgggcggtcaaccagattcaccgtgattagtctcaccctagtttagtctaatgaaattggatagtataggtggatggttgggcctgtcgcaacgtggtatagcgttggacagttgatgaataatattgattaattattacaactgtttaattctttcaacttctgtttataaatgctcgctttatgcaaatgaaccactctagctctcttttgataattccctgcatcatacccctattccggtatgacttgctgagtacagtgggtagtactcagtcttgctctattttcctcaaccccagagtacgagtatgtgtccgatggtggtttctctgaggagtaggcttcgtccgtgccgtcgaggatgcctgtggagtggtgttcccgctgcagatcaagtcaaggcttagctccagttatctttcgttttttcgctgcatttatgtaagacttttataatgtttgtaagacgtggatctgaatgtcaacattgtcgtttgtgtaccccggccggtcctggacggggattttaatgcacattctgcttggaattctattcgggaatttctgggcgtgacacttgtgctctgacggggaagatgactattcacatggccaattgccaaagctagcagcggcagaggagggatggttgagagagacgagatacgtacgcactgaggcactgacatgtggtccactagcggctgctgaaaattttagtaataatatctgccccaaagtgtaaagatgagctaacaccaggtccataatgcaataatggtaaaaagaactactccaagatgcaatttactcatatatatatatatatacatatacatatatatatacatatacatatacatatatatatatacatatacatatacatatatacatatacatatatacatacatatacatatatacatatatatatatatatacatacatatatatataattgtgaaaacctgattgagatgacgggggtctctcaaccagttctctctctaataaccccgggaacgccagaacttctcttgctgctgataacgttacgttcagagcacatgaggatgagaattcatggaacaggtaccactgatgttagtaaccgaaaagctttgccatgactaagctaatgaatattggcatgtcatggattgcgggtaaagcgtgcatttactgcaacaaagtaaacatgaatctattcaaatagccgtgctcacgggtttgagtatcgggactcatatggtactttggttagaaaattaattcaagattttactaaatactgctgcatttaaaacattacatgttttctacttctatattctctgctttctgtaagtaatcataactctactcaaatattaccctttcatacattcattattgaatataatagcttgctgagtacgttgtactcacctttgcttcaacccctttttccagagttgaattgaagttcttgccgaagccgggagttcaattatataagttagtcttatttcaacctagttctcaaatctagattaattaaatagtttaagtctatagcaaaatattagggttgagtcattttatagcttttgctgtaatagttagccacaatcttgtagattcccctattattttaagtaataacatctcctttggagtcttgttcaaatgtacgcaataaagatccagattgttgaagctgtatcaatctactgattcatggcttgatgcagttaaacatgtcggtttccgaattattggttttgggagccgacaacaccccttaacagttaattaggtgagaggtctgtctcccatgcatagcgaacgagccaaccaaccaaatcctatcttgacatgttatgacttggttatggcctgttctagacagggctcagctttagcaactctgttctctctcacaagcaaagcaaaaggcaaagccatggcagtcagcaaaaacatgttgcatggcataggcagagaaaagcggaatttttttaaaaaataatattattttaatggaaaattacaaaagttgaagctgatcggttaaaattgcaagtttaatgccctgtcgaacatccatagttcgacaggggtacatatcgaacaaccacaattcgatagggtacctgtcgaactgcgattgttcgacagggtataaaaaataccctatcgaactgcccatgttcgacaggggataaaaaatgatagaaaaaaagaagatcaatcactatgagcactgtacaccactgtgcatgcagccctatcgaactttggatgttcgataggccccctgccatgctctttcttgtccttttctgtttttttaagtgaaccacaaccctgtcgaacaactgtagttcgacaggtacctgtcgaactgtggttgttcgacagggtatcaaacttgcaattttagctaatcagctactacttttgcaattttctattaaaataatattatttctaaaaaaaattcgagaaaagcgtacactccaagtcccataaaaaacactattttaattataaacctgaacgtgtgcatctaattcgtagatagaatataatttttttacgacggaactcggaagggatagagagtataccagatggcatgttcagagtatcaacagattggctattttcagctttccaaatacttatttggcccgtcattaaaaaattggagagccaaatttaccttttactccaacagtctctccattcacattctccaatttaacattgggtcccacatgtcggtctctcattcctcctccttcttcctctcctttcttctcccgtgcctctcctatcctgatgcgggcgacgacgacaacctcggcaaacggcaaagcgacctcaacgacgacccggggcgtggagggtggcggcggtcacggacggcgcggaggacgccggtcgcggacggggacggctcggaggaaggcggttgcgggcggggacggcgcagagggccgagatcacggccggcgaggacggctcggagggcagcatgcgcggaggacggcagcggtcgtggacagcacggagggcggcggtcgcagccggggacagcgcggagggccgcggtggcggcaggcgacgacacggaggacggcggcggtcgcggccagtgacggcgcggagggcggtggtcgcaaccggcgatggcgcggaggaaggtagaggttgcagccggtgacggcgcggagggccgcggtggcagccagcgacggcgccgaggacggcggcggtcgtggctgttggaaatttggtcataattcggcatattttaatccaaaataacaagataataaacatgatatttacaataggatttgatccagtgatagtggtgaatgtaatcaacatgagcatgcttatcgttgaataagcatcaacaatcacataatgacacaatgttgacattgcgatgaacattaacagtaaaacttctaattgaaataatgtaataaggttataccccaagaatggtcctccgctggagtttgaggcagtattgcctccgttggtgttgacgggagtctctttctccttgtctccagtgttcgacatgttggtgaagatgaagtagatgttgacgaacagtgagtagtcgcgccttgcgctccccaaaaacctgatcgcccgcccgtctgtgcaaacgtcgcagcaacgcgtggtttcggaggcctactctcccaacgcgtgtgcacacactcgtcgggatgggattaccgtagcaacaacagcttttgaaaatggatgaaagtgtgtcttcttcttctcgcggaagatcaaatccattctcattttataagaggaatggaagatgaagagtaagagtcatggaataggaagaggaatggagcaactaattgtcatcaactagccatgaaccatcctccactacacaaccatcaaccaacaatcaattaagagtaattgatgtaagttaccaatggaataggaagaggaatagagcaactaattgtcatcaactagccatgaaccatcctccactacacaaccatcaaccaacaatcaattaagagtaattgatgtaagttaccaatggaataggaagaggaatagagcaactaattgtcatcaactagccatgaaccatcctccactacacaaccatcaaccatccatcaattaggactaattgatataagttaccaattccttaatcaaatggattaattctcaaaactcttcatcccattgatatcccatagaagaatgaattcacatgaattcctagcataacgagccttggaatttatttgatttaattgatttaaatggattaattacccaattaaatctaacaatccccaccaaatttcaaggctcatgagaatgctctctattccatagcagcttttatataccagtgtttcggtgaagactgttaagttgaactttcacctagaaaaggagctatacctgaccacaactgaacaatggactatgccttgaattgtcagtcttgtgcagttaggtttcactcaattccataactgatactagacaaccattagtattccctcgggttggagcttataagtcatactccaggcctttcatgagtatctagagatcacccaaatctcatagactgtgactagcagtcgaactcatataggtgtgttccttctaagatgttctgcaggtcaacatctctgcttggaaaagccactcggatcacattaagacataagccatcctaccatgcaggaaagaagagaagcacatcatgaaaatgagcccttttcaagggtctcttctctcagtcacacaatagtttgtttcaccatccaaattcacgggatctccgatcataatggacaggtttccactattatgcaaccttaggtgggtatcaaacccatttccctcgatgcactgtctatcacattacgtggtagccccttggtaaactgatctgccagatttctagccgtttggacatagtccaatgctatcactccggagtttttctgctttctgacagatttcagtcttctcttgatgtgtctagatgacttcatgttgtcctttgaactgttcactttaataatcactgtttgattatcgcagttcattaggatagctggcactggtttttcaaccaccggcaaatccatcaggagttcacgaagccactcggcctcaactgtcgcagtatctagtgctgtaagttctgcttccattgttgacctcgttaagatggtctgcttgcaagacttccaggaaacagcgccacctccaattgtgaacacatatccacttgtggcttttatctcatcagcatcagatatccagtttgagtcactatacccttctagtacttttggatacccggtatagtgaattccatagctcatagtgccctttagatagcgcattactctttccagagcctgccaatgatcatctcccggatttgagacaaaccggctcagcttgcttacagcaaatgagatgtcaggcctcgttgcgctagccaagtacatcaatgaaccaatgatttgagagtatctcagctgatcccttgctattcttcggtttttccttaatagcacgctgggatcataaggagtaggagctggcttgcagtcactatatccaaagcgactcaaaaccttgtccacatagtgggattgcacaagtgtaatcccaccctcatctcctctttgtagtttgatgttaagaataacatcagcctctcccaaatccttcatttcaaaactcttggacagatagtctttgacctcctcaatcacattaaggctggtcccaaagatcagtatgtcatcgacatataagcacaagatcaccccttctcccccaccatagcgatagtatacacatttgtcagcttcgttcacaacaaagcctgcagatgtaagcgtggtgtcaaacttctcatgccattgcttaggtgcttgcttgaggccatacaaggatttcaatagtttacacaccattccctcctgaccttctagtacatacccgtctggttgatccatatagatctcctcctccagctctccgtttaggaaagctgtcttaacgtccatctgatggacgagaagaccatgagaggctgccagagcaagtagtactcgaatcgtggtcaagcgagcaactggtgagtatgtgtcgaagaagtcctcgccttccttttgggtataacccttggccacaagccttgccttgtacttttcgattgtactatcaggcctaagctttttcttgaaaacccatttgcatcctacgggcttgcacccatatggacgctcaacgacttcccaagtaccattagacataatcgagtccatttcactgcgtactgcttccttccagtagttagcgtcaggagatgaatatgcctcttctatggttcttggggtgtcatctacgaggtatacaatgtagtcatctccaaaggattttgcaatcctttgtctcttactcttgcgagtatctacaatgttgtcctcctcaggattttcctcaggcgtttgatcattgtgttctatcggttacatatatattatttacagtttacaagccaagactgcaaaacatgctactcctttcgtttcacaatgtaagtcattctagcatttcccatattcattttgatgttaatgaatctagacatatatatatatccatttagattcattaacatcaatatgaatgtggaaaatggtagaatgacttacattgtgaaacggaggaagtatgaagtagaaaaccctaaaatctattctaaaattagattttgttacaaatgataaaccaacaaacataagatgaaaacgagtatgcctgccatgaactagaatgaactgtttgcatggctaccccaatgatttgttcggtatgggctgatgacgaattcagtgtgctagctagagaaatataaatattcatagagatgccctataattccaaaaaggacaagatcaaaatatggaccaactgtagtaatagtatgatgcaaactcgtctgctcacggcactgtcaatcttttttttttttttgaacttcaccaccggattctttattaatacctggattcaatggaatcacgaatcacctttgcccttacaaaccctgggagggggtcaacccacacataagattgacctgtatcccaactcacaccaagtcgagcaagttcatgcgcaacattattacaagaccgtggcattgtcaatcttcacttcttcagtcttatgatgccaccaaatcttacagtattagtgtattatatttgaggatatatcgggtgaaaacgagccaactgttgaaaactcgtgaaaaatatacctaaaacttttgtaaattcatgaaaaaattactagagatgggtgtagatatgaaatacattatcaccaaatctcaactccaaactcaacttcgtttaggagagagaaaaaagacaaatttataatattcctattcacccaaaatttgtattttttgtttctcctaaacaaaattgagtttggagttgagatttggtgaaaaatgtatttcatatctatacttatctctagtaattttttatgaatttacaaaacttttagatatgattttcatgagttttcaatacttagcttgttttcacctgttatgtcccattatatttagaccaaagataggcagaaattttatatgatttttgactcattttagattgcgggaatttaaaggatttcacatgttttgacctaagaggagagcaaatagcatggtggaaaataaaccagcaacggcagcaataagatgcagtaaaacacacatgaactccatatagctcagtagctcacttcgtatgtaaagcatttgtagcatcgaatcatacgaaccaagccaaccagagagggtgaatggttgtaacaccaaaaaactaaaaacttttagcggaaataaaagttaccctcatagttgatgaagatctcggcgtagccattctgatcgcagtgtgctcatcggtctgacagttcctatgccgccggtctaaccggtgttgtccagccggtcagactgccacctccacacttgctgctgctcgccactgtcagtcagaccggttggtcgcctctcgtgagaccgctaccatgccaccggttagaccgccgccccgtcggtcaaaccgtcgggatctagaaaaacatatatcgacgaaactcttgaaagtggataaactttattgcatcaatatatgtttacaaaatgcatctaaagcactcctctctaaacacacgaattaggattgaaacctagaagctaaccctaacttttctctcccaaaaagtcgataccttctaatctcaacccctcatctatttatacccaaaacatggctgccacctagccacgaatctaactagaactaagagtcataatcacataggaagcctatcaaaccagagaaacaacatccccgtataactccaaacttcacacttcccaaacttgtctccaatccaaatatgactcctcttttcataggcacacaacaccacgtgtgtatgccacgtagaaaccttcacctccacacatgcattgttctctagtctgagcatcccgagtgatattcttgactatgtggaccttaacttctcccaagcctagtcccgatccatcaccgtctatactcccatagacttaagcaacacctgcacatgaacaacaaagaaactttatatccgagtacaagttcgcaccaacttgactcacatcagcacacaatagtatcacatacgaatagaaatcatctagaagtcatatccatgaagcaatatagaaatttcatgaaaacaacctgaaaccatctccctcccaaagtctgctgggtcaaaccgcccaatcaccaccggtctgaccggcggcacccgcccggcctgactgtccacttaagccgacaaccgaaaacgcatcacaccgtattttcacaaaacacttacctttaacaattgttcatatccacgattaaatcatcacatgattctacaacatttccattcatccacatcgcgtaaaccttatactcttttctttagctagagcactactagagcattgaaatttgccttgcgatcgatatggatctcaatcaatggtcacgagcactttcactgtcttcctattgtgtcggctgcctatccaattctttcctcctgctacagtttctttctgcaaaaggctctgctgcttcgtgttttttcatcaggatttcagaattcaggttgagcagtacaactccattccttttactattcctactctctccatttcatattatatgctttgacttttttcaaactttttaatttagctaaacttatagaaaaaaacatagcaatatttttaacaccaagcaaatatattattaaaatatattcaatgttatatttaatagaactaatttggagttgtaagagttactatattttttctataaatttgatcaaacttataaaaatttaactaaagaaaatcaaaacatgtgaaacggagggagtacctttttactagtagtatatccctgtcacaagactcacaaacactggtcatctactaatcaacaactcccatcattagccaatctttcaatcttatcatgctacggagagacagaaagaaaaaaaaaaggaagaacaactttgtttctggaaaagaataagatcaattagagaaaggacattgacagaaagtcataataatttgattattaaatactagcaattttggcaatcaggcgccgctagttatgacgatgatgcaggtgtaccgacgctgtctgttggcaacggagcagttatttgggagtactaatccagcatggaatggattggattacttaatgagtattcggtgtaggctaaagcacttgacgtttcctcaggaagaagcaaacccccacaaataaagctcacggtcgcttgtaacttgggtgaccgtttaatcgagagaatgtaacatatatatgcaattataaggtgatatattaagtttataaatctaccggatacatatcgatgtggatactggaatgaactccattattgttaaaaaagaataagtttacagatgttgtatgttttgtgttgctatggccaatgttcgttgcttttacacacagatgcctcggtctcacattctcacgctctccttttcaaattatttaccaagttattaaaacggattatttgcttcacgtattaaaagaatatatttttttaaaaaaaaagtcttatattgtattacttatattacttcgatcacatgttttaaattatatatatgttaagttcatttattaaaacatttaatttatttttttaattaaatagataatctatagtaacaatctacttaataatcttgttatatttgtaacctgattatcggagagaacactaatgtgtcagtagcatagcatgaaccaattaagtaagtacaatcttcaaattagctgaagattaaactttgatttgaaaaaaaaatgaattttgtagtatactaattctattagattctttttatatggtcctttgaaacggattggtaattattacaaaggttttgtagtatttttaatatgaggtctaatctcatgaaaaaaattttatgagtctatctcttatcctatttctatgttttttaactacggtgcaatcaaacgatcatttctaaaaaattttgttttttataatcttttgttttgtacttaattttttgtcaaaatctttttttttcagtcgtgcgtttcaaaggaaacgcataaagacggtggatacctatagactttttattctgcttgtccatcctcacggctgccaaagatgaactttccagctctgcagaaaaaggcagtgttcatcggaagagctccatggcattttctacttctttttattcagtcaccacttgcagacacagtagtaagtaccctctctatctcaaaatataaatattatttttagactcagccacggtcttcaatatgctactttgatcaacaatatctttaaaagtaaaatggtttaagtagaaagagttacatattataatagtttatttaatgataaacctagtagcatgaatttgtttatataattgatcttttttattattttagtattaatagtcaaagttaaaaatatttgacttgtcactatataaaaaatgcttatatattatttttttaagtactcatcgagaacctatgatctctctccaggacatatataatttataaagaaatactacatctagtgacaatggttgtcccgtctgacttcactacatctatatggatatccattgatctcacctcactgtgttccttatgtttgagagtaccatatcaaacattagcaactatctatattctcaaatagtttccatgttaagtgccaaggcacagcaacagccatatcacatgagacagttcatctatcctctaacataaattatgttgttctttcaggtaattttaccatcgaaggtattaggtgatatcacattttcaaatgtaatgtaaaatttgatatctcaagtactaaaattttaatataaaattttggcacctgcggttactttttgaattactccattcatttcatattataagtcgtttaactttttttctagtcaaacttggagaagtttgactaagtttataggaaaatatattagtattttcaacacaaactaaacatattatcaaaatatattcaatgttagattaaatgaaactaatttgatcttttagatgttgctattttttctataaacttaataaagtttgaataggaaaaaaaatcaaatgacttataatatgaaacaggggtagtactatataatttatcttttctttcattttcctaacaccacaacagaaatcacacggctaaaaaatatcataatatatgttggcacgtaggtcgagatcgtcttgtatgccatcaggtattattaagcgtggcgctctggggcgatggaggcgcgggccacgtcaccccttttcctcccgccgtccgatcaggcatggatgggagtgatgaggcatgcggtggtggaaattttgcaaaaagaaaaaaaaaccctctgttttgtgcgtaattcgaaggaaatccctcatgaacagtaccacttaggtgatactttacgtggaggctcttctagtgtacaatgatattttgcaacaactcaccacctatctctgcaatggtattttccaaattctctctttttactaacgcaaaattgtgttttttaccaatataaatgaaggaagaaaactactccctccgttttaggttataagacgttctgactttggtcaaaatcaaactacttcaaatttaactgagttaatagacaaatatagtaatatttataataccaaattagtttcattaaatcaataattgaatatattttcataataaatttttcttgggttgaaaatgttattattttttctacaaacttagttaaacttaaagcagtttgactttgactaaagtcaaaacgtcttgtaaactgaaacggaggtagtaatatacaacagtacaaagagcaagagcttaaagaagattatatatgtgtgtgcatgggagttaatacaataatcctagtgactttcctctgttgcaacctccctccctgagattccaagctttccctctcaccaccaaaccattaaaggcaggcacaggcacagcagctcagcttcctcctctcctctgcactgcttcctcctgatgcttttcatggtggagatggcaagaagcttccctcttcctcctcctcctcctccccaaaggtgcaatgccctcgcctttgcatcatctttctggttaatttagcttctcccctttctcgtgtccttagatttcttggttcttggtaacgccgcctctgctgccggaaaatggcggcggggctactgctgaagctggtcgggttctgcttctgggccgtcttctggctcggcggcgccgccaccgtcagcaccaacgccggcggcgaggcggcggcggcggcggtggtggtggacgcgcggtccgccattgctgtgacggacgaggacttcgtgtgcgcgacgctggattggtggccgccggacaagtgcgactacggcacctgcagctggggactcgccaccctcctcaacatggtctgtgtttttctttcttttcttttctttttttttcctttcccatttcatgttaagttgtttggaaagtttttcaaatttgagttccagaattgacagtaaatttagtagtttagtatatcatctcgttgcaatgcgattccgtagaacatggacgtggttttcaaggatgtttcttgtgcaaatgcatttctttctctctttttttttatgtagtcggcaacggtttggtttggatctttttgggagctgtgttggataggaatttgacggcctagggagtttcatggacctataattttgtcggtccatttgcatttccatttgcatcacaaccttttcctaccaaatcatgtgcaaatgtaaagcctactaccttaaagaatgtttgggtcaggtttttatgaaaagaggtacacagtggtaggaaaggtagcaacagtagtttattttgttgcgtgcctcttcaactcaactgtgattttttaaaaaaaaaaagaagaagaagaagaagaagaagcaagaactcaactgtgctagcttggaagttgggattctttggttgctaccttgcaaaagtgtacaataattatggtcatgagcacgggtgattatctgattgacacaggtctttaatgattatctgattgacacaggtctttaatgttttcctccgcaggatctttcaaacaaaatcctgttgaatgccgtcaaaggtaagctactacatggtcatcactttcagttgcatgaatgctgtcttactgtccaatcaaaagaagaagaaaattttttaggtccatgtcatgcttcaagaatctttcagaataaaaattaaacatgagacaagcaagctcaagaagttgaccggcaaaacgatttcctgtctttgctgggaatatttcagagccgtccattttcaatctgacaacggtaattcgcagttggtacaatggtcaagtgactgcagctaattcattttgcagcattctcacctctgaagcttaggctgggaggatccttgcaggatgtgttgatatacgacaccggcgatcctcggcagccgtgcactccgttcacgaagaactcatcggccatgttcggtttcactcaaggttgcctgccgttgcatagatgggacgagctcaatgcattcttccaaaaatcagggtacttccagtgtattcagctcgattcagcctcaaaaaagcaatgttttgtttggacttttgattactgattggatactttatggatgcagagcaaaaattatctttgggctgaatgctctgaatggtagggttccaatgtctgatgattctttaggagggccatggaattacaccaatgcggcttccttcattcgctacactgtcagcaagggctatgacatccatggatgggaactcggtatgtttgtttttgtgagctatcttagattaaagaacttctctctcttttgcaatggtattattctcaagctactttaggttaggaaaagaaatctgataggttggcaggaatgagtccagacaagtatgtcgacatcgatttagatagtgttgagctatctattagtataacgatcatagatgatgcttttactggcttttcacgcgtcaatctacaaaagggaatactttcatgtcatgttctttgctttccaaagttttgcttaaagagcaatttatatctgaacaatacttttgtactagcattctaggaactcaaacatacagtccttgtttttttttaaaaaaaaaaaagggaatccttttgtctaaaagaaaacatactgtccttgtaggaaatgaactcagtggcagtggagttggagctcgagttgatgcagaccaatatgcacaagatgttctagctctgaaacaaatcattgacaactcctaccaaggccatgcatcaaagccactggtgatcgcaccgggaggtttctttgatgcagcctggttcactgagcttatcagcagaacaaagccaaaccagatggatgtgatgactcaccacatctacaatctaggccctggtatgatccctgtcactgaccgtgaattcagtacatgagctcaaagcttcgaatctgcctaaatggacaaaattctgaatatttcaggcgtcgacacgcacctgattgataaaattcttgacccgtcttacctcgacggcgaggccggcacattcagcagtctccaggggatactgaagtctgcagggacgtccaccgtcgcgtgggtcggcgaggctggaggcgcttacaacagtggtcaccaccttgtaactgatgcttttgtgttcagcttctggtaaagattttggagcatcattttcttctcaagttatcctctgaagaagccattactgattaggctttaacaatttttcaggtacttggatcagctaggaatgtcatctaagtatgacacaaagacctactgcagacagaccttgattggagggaactatggtctgctcaacacaacaacgtttgaaccaaaccctgattactacaggtaaatacatctgcatgtctattttttttttcttggaaaggttttacctaatgtggaagtacttcattggaacatagttgtcctacgctggatcataaataacaatacttaatcatccatggtgatgaactggcaccataaacttattagaattaatgggggcatatgccctacatgtgcagaatatattccagctattagaatcttttctttccgggaacaaccaattataagaatctgacagcacatacctaatataaccaagctaaagattggttccactgcattcaatcttatagcaaagctaaaaagatcgtttccactgcattcaatcttatagagtgaaacagtgtaccaaggtcaccatcttcatccaacttttctggctctctttcagtgctttactatggaaccgcctcatgggaaccaaggttctctcggcaacattcaacggcaccaacaagatccgcgcttacgcacattgcgcaagagattcagtaagtagtataacatgcaattcaaacaaacaaagaaggagatcccctttatccgtctgcgacgaagtgtatcagctaactgaacactaccaaatttcctctgaattttcagcgtgggatcactctactcctgatcaacctcagtggcaacaacacaaaccatatctacgtgacgagcgaaggcgtgcaaccttacagcacaaagaaggagggccgcagaaggttcggacgcatccccgggctcggcgaagaagctcagctcatcagagaagagtaccatctcacccccaaagatgggagcctgcagagccagcatgtgctgctgaatggcaatgtgttggcacctgatgccaatggagagatccctaagctggagcctgtgcaggtggagggaacacagcccataacagtggctccttactccattgtgtttgctcatattcccagattctatgctcctgcctgtaggtagatattgttgattgttgattggtttttgtgtgaatttgggatgatgtttattatcttcatagatttagagtaattgtgggtgagaggcaaagcatgctcacctgctgcaaaatgaagtaaactgtaaggctgaaagctctgtgatttgccattcttttaggtggaaaaagggttaaggaaatgtatgaacaaaaggatgtgaattgaaaagaagaaataatagtaagttccaatttgatccatgtccctctcgtttggatggagaaatgggaatcaccttgatgcggtgtcagcgcaagcttaagcttactaaggttgtgttcggcggccagttttcccaactcctctctcgtgttccgcacgcacgcttttcaaactgctaaacggtatattttttaaaaaaagtttatatacgaaagttgctcaaaaaattatattgatccatttttgaaggaaaaaataactaatacttaattaatcgcacgctaatagaccactctgttttccgtgcacagcatactttgttcccaaccagttctaacaaagtcagcctaaggccttcgtttggttgggccgttcccagccgggatcggggcccaatccctgtggatcaccccggcgaggaaacaatcccggcccatgcgaaattgtgtgttcggttaagcccagtctgggttttaccccggcctatcccggcctttccccctcaccccggcccgggaaaaaatcagcttctcgtgtggcgttggaaaaatcctcagcccgacgggagccgggtggcgacgcgcagcggcagcacgacgcggagacgattcaaggtggcgctacggcgggggcagcgcgacgcgggggcagcgcgacgcggaggcgacggcgacggcacggcgctctcctccggccgccatcttctctctggtgagcacgcagccttttcccctctcccttcctcttccaaagctagggttagggctttcttctcttctccctttcccatcgtcgccgcgattcgtcgtcgtccccctcgtatcctgctcgatctggtgagttcttaatttgggtgaggattagtgagttcttgatcagatggggaatgagccttttttttcttggttgggtgggtatgagttcttgattcgccgccgccgccgcacgtcctaaaccatctcattagttcttgatttgggcatggtgagttcttgattgctgcatttcccggtgagttcttactcgtggtgagtaagaaacagagttgcgaaggctgtccatggcagtatagaatgtaataactcactagaggttagaagagggcaactccggctttaaactgtatgatttctctgacataaaagatgcaactaataatttctcaagtgaaagtttgcttggaaaaggtggttttggatctgtctacaaagtaagttcagatttcagagtcgcactctattaccagtagctagcaagcaactaagcaagtgtttagtgtagtaacaatgggaacatccttggtgaatgctaatggtaaactagacagtcttgtacttttccattgcctcgtcagttgcattgtggctttggtcctgatgataagcaagatgtctcccaaggaagttgcatttgagggacctttttctgaagcaaccaatattgttttgtactaggataatataaaagtcagcggtacttgggcatttgggcttagaaaaatcaaccaggtgtttcaccatgtacaaagagttgtactgttatgcaaccggagaaagccgcaactagctagctagttctctgccatacatgcatgtgcacttccagctataccaagcgctatgtatattgaagatgacaaggtttttgagagatttaaacatgaattagtagttttctccggcaataataaggatgtagtttgtgaaatcatatgaggtagtagcattgtaggatttcttctgttggttagtaactatacttcctctgttaatctgaagctctgatcatgtgcttcctggatctgatccttagtgaatctgattcttatctattagagcttgcatttttcagaaataacagtttttggacatactttcagaaatgagcatgtagtcttagtgaatttggtgctatgtattgatgtgactgcttgctgcttgctgcctgcaaaggacctgtatttgaaagtagacattttcaaaagcagaacatgtgaagtgactgacctgttgcagtgcataaatatgattgtgtgattctcagagaagaagattgaaattgtgatgaattcagtactgttgttcttatatctcagtttgttttgtaccataactatttcccttcattttatttactttgaagtatctactttgctccaggatagtgctgtgctccaggaagatggcaaagaagaagaacccaattgtctttatggatgtttcgataggtgatgaacctgatgaaagaatgttttttgaggtaccgtgtggctctagctatgtgcttcattattactgtgttgtcaaggctgaattgtgcttccacacattctaattttcagagagagaaactagaagaaggttgaggtggtcatccttttctacattcaccatatatctgtctatccactatatatgatttctgcatcctcttaaaattcaggcaactcaagattcacatctgttatacacttgagtctgaaactttgtgcgttataatgttcattgcattatgtctggtagaagaaaaaagaataattggatggtagcagttttgtttctttatttctgagataggtaaactgatgtctaataactgattttccttgcaggctccttgaaattgactggtaggatgtttcatagaattcctttgatggtagcagttttctgatggtgtcatttagactaattaaccatccaatgaatggtctactgttgtgtcattttggggatgttgggagaagtttggattttgttgtgcatttggactaattaatcatcgaagtcgtcggcagaggattcaacttgctgagtgtaagggaatggaatcagaacaatcttcttattatactgtataaacatctcctgtacttttggctggcaccacattggcatcaactttcttgatccaagaagttgtaacaagcatgtatatgttttctagttttctctgaaatagaccgatggtacttttgatcttgctcctgtgctactgtcacagggtactagcactactgcttacaggtaaacagtggtaactaaatatactaatagttgtaatactagtagatcataaagagagctagcaatacgctgttaaattccctgcccatagccagtatattccctgtcaaaacgaacacagggtttctaagagagggattggaagaaacaagggatttaatccctatagggtttgagtgacatggaagggattcactcaatccctccctggtttgcttccccttggggatttaatccctagtaaccgaacaaggccttaggctattaatacttaatctgagccatccatatttgatctcacgacttgggatgtgcacatcaagcatcaacacaattcaacatgtgaaaccggtgcacatcgccaaaatttggagtttttgtctctacaataggggacaagatccactaaattacattgacaggctcacggcgagatgagcaaaagattcagtcatgcatcgtaacaaactactggggttgaggcatgtggaactacagtacagaagaaagcagaaggatgaacgcccgttcttctgttgcattgcatgtcctattgattatgcacagttatgttcagcaaccaaaaccagaggtatgcacgggccactagtcaataggcacttccacctccatctttaggccaggatgatctataatctggaaacataagggaaaaaaaagtttcatagctgcttttagtgtgtgttgatgcaataaaaaactgtcccagtagccctaattgaacagtatatgcagcacgcaaagaagaaatgtactagtatatggtaagctgtggtaaattgtgtcgtaccctggtaaaatcttccaaagaaagcgtgcaatcccttgtgtatccagcttcttccagtacatttgttattactcgctgaaaggtatcgataggatttgtcaatgagcctcatcagttgctcttattttctaataagtcaaaacggctcattaggaaataaaaattattttataggtaaaacttttatatatttgttcgtaacgacttaaaaaccaatgctaaaaaaaatacgttcaaaatatcttaaaatcaacttcaaaaattaagttcgaaaatttaattttatcttttgctttagcttattaggcaaaccgatgggactcaatatttaacgaaagcatcgataaattatgcgatttttttattttttggacttctttttctttttaattttattaatagaccattccaaaaggtatttccgaaaactaaaccttttggccacgccagccgagtggctcgcatgacagcattgtttggccatgccagccacagtggcgtggcaagaggctgtgtgtggcgtgactgagttatttggctggtgtggccaaaaggttcagatctagaaatatttttttggaatggtctattaataaaattgaaaagtaaaaaagtctaaaaaataaaaaaaaaatcaaattatgcttatttcttatgttacttacaaaaaaaatgccgtgcttgttagatataagaataaacagttacttgaatacgaaatgaggaatcggaatagcatatacttgtatgcctcgacattattattatgaagcacggaaagaaatgggcacctctctttgttcctctgtcatgaatgaccctgtttggtcccgcaaaacctctaccaggtctttgaaggttaccttccccttgccatcaatgtcatacaccttgaatatcactggttcatggaaaagtgaaaccaaatcagtaccaggttaccagagtgctgaggaaatcccagtgaacatgcacttgtttgaaagaccaacaaggaaattatcacagttaggcattacactcaatcttttgctgaacgctggcctttgcactgaaggtagagaggaaggaaacaaaatccttgaagttcagcccatcaaccatacgcagcaacctctaaagaaaaggaaggaaaactcaatgagtcaatgttagtgagatgttaatgcgtacattcaagatccactccattcaccagaaaaaagaagattcaattaacgacaacacaaatttggtgttactgtgccaacattttgaaactgcgtgtaaacagggtatgctagatctttacggtaaaaaagaaagaaaaaagaaagagcttcaatccttctctaggagtgtcttttttttttccctgaagattttcctggtttaggataattatgattcggcaaaagcataagatgaggggcgaattcgcacttgtgtgacctatttttcccgagtgttactagtatagtactcctgtaatttagtggttctgtgagcctgtgagggcaagttagagtgtgtttagttcacgtcaaaattggaagtttggttgaaattgaaacgatgtgacagaaaagttgaaagtttgaagaaaaactttagaattaaactcggccttagaaaagcaacaccattaattaattaattttcttgtgcttgagtggcattcattaattttcttgtgcttgagtggcattcggcaaggtaaacgatcatgtgctcaacagagacaaaagcagatatttcccttttcttttttgctttgtttcgatggatgggaataaatatacagtaaaagttggttcatccgacgaagaatcgaacgagataggaataggatagggaagaaagaaccttggagagcgggttgagggagaactccgggatggagaggaactcgtcctcggagatgaaccccttggcgctccgatccagctggcagaatcgctcgtacagcgacacgatctcctgctgcgagactatgtacaggatcaaaaccccccaaatcgatcaggaaaaccctcttgtgtattacaaaatcaatcaatcaatcaatcaatcaggatgagcagagttgcttacagaggtagttgcagtgctcctgcacctcctcgatgtcgtactgggtgagcatcgacgacgcgttccccatggccaccgcccttcctcccgcccgtcaacggcgaggcggcggcggcgagcggcggtgacgtgtgggcgaaggagacgaaggcgagtagtagagtatatatggggcgtatattcctcgcgatcgatctcgatgacgcaatcggaggcggaggcggaggcggaggcgacgcgaccgagcattattatgtgcttcggtgtcaaggacctcatggtggttatcgcctttactctcttattatatacgtgggcttcttcgtgccctggcccgcgcgatttcgtcctggcccgtgccaggcccacctagcctagcctccttttcttttacttttttctgtcttttgtccttttcttttgtttcctttttctttttattttttaaagaaacacaatacaaacgcgacatgcacaccatactctgtgaacatctccgaaaggctggaccaatatattttaagattgacagagtcagatcatttcgttgttaatggatacacagtctatcactaaaagtataataaactgtaaatacgagcacctatatctatcatatttaaatctaggtggattggttccaccaacaaataaccaacatgttgaattacgcccacttggccacctagcgtcctcttcactgtatttttagtgccttctcaaaagaaaattgcaaatatataaaacatgtgtcgtgtttgaatttacattttacaaccgcggcggaagggacttgaaaaacttgcgagatgactccgtccgtctatcatcgtgcgcgacaatgttaagatgacaaaaatatgcacataaactgcagatgaaaaccatctggtcactttatacaagccgtacatcagctaaaagaagttcacgatgcctcagggctcaggcagacagaaactgaaaacgacgcagcaagttaaaaacaaattacaaaacctacatgagacaaaattaaatcgtagagatagtgtcccactaccaccaaagcaacattatttgcagaggttcctttttttcagcccacatgatcccgtggtctagttattattcgaaaatctccgtccgtcctcaaattcgatcgaattttaaatctctctctcctagaagagcttgaatagaattcctccgtgcgtggcgaagaatggcgcgaacaccagcgactcgacggccatgagcttgatgaggatgttcagcgacgggcccgacgtgtccttgagcgggtcgccaatggtgtcgccgatcaccgccgccttgtggcagtccgatcccttgggccccagcgacctcgcgtgctcactcgccccagcctgaaacattttccatccatattcgcatcaagaaacagatcgattgacgatgcaagaacagtagtgagtaatcgatgcaagaatcgccgtcacctcgatgtatttctttgcgttgtcccatgcgccaccggtgttcgacgcagagatggcgacctgtaagaatgtcaggtcaggtgaatccgtcactcagtgacatgatctatgatcgtctcttgtgcatacctgtacgccggagacgagggcgccggcgaggacgccggagagggtctggacgccgaagagggtgccgacgatgagcggcgtgagcatgacgagggcgccgggagggatcatctgcttgatggaggcgtcggtggagatcttgacgcagttggcgtagtccggcttgcctgtgccctccatcagcccggggatggtgttgaactgccgccggacctcctccaccatcttcagcgccgcgctgccgacgctcttcatcgtcatggcggagaaccagtacgggagcattgctccgacgatcaatccgatgatcaccttgggggacaggacgtcgaccaccttcaccccggctctgctgacgaaggcgccgaacagtgcaagggacaccagtgctgctgacccaatggcaaaaccctgaaaatgaacagtgcaatgttcaggtttgccactatgcaagcatggtttcacttttttttagagaattgtatttttaaatttagtaacttagcctttcaaacatggaacttagccctcaaataacccaatttgaattcaggaccttagggtgctactcaagtcactgtaaccactaggcacatgtcctttcacagcatggtttcacatagccaaaatatgatcagtttaagcttgttcctatctgagtatgctacaaaggatttgtcgaaatgattattacctttccaatagcagcggttgtgtttccagcagcgtcaagagcgtcggttctctcgcggattctgtggctcatccctgccatctcagcaataccaccggcgttgtcgctgatcggaccataagcatcaatggacagtccagtggcaattgtgctcagcatgccaagggcagccactgctatgccgtacatcgcagcaatggtgaagctgacgtagataccaagcgcgatagcgaaaattgggataataacagacttgtatcctagagcaagcccaaatatgacattggtggcagcaccagttctgcaagcatctgcgacatcctgaacagggctgcagtgtggcaacatgataaaagttaaaaacacagccatctagcatacaaagaatatgccattggtaactgattgaattttttttttttacctgtatgcattgctagtgtagtactctgtcacgtatccgatgatcagaccagcccatagaccgatcgaaacacacaagaacaaccccctgaaaatcatcaaatagacacaataaatcaggagacatgtctcatgaaaacacaagtatagcaagtggtagcgagaaaattaccagttagtgacttccttctgttcaccaaaattgaagatggtgaatttgtatgggagcgccaaccaactgaccagtgcaataccaacagtcatcagagccgtagaaatgatgagctgcttctttagtgacggttcgatttctttcacggccttgatctcgaagaagtcagtggcaaagagagtggtgatcaagcagacaatgatgcccatggagctgaccagcagcgggtagcacatcccagtgaaatcatggttgatcccaaaggaagaaatggaagcaacaacaagggcagcacaggaagattcagcgtacgacccgaacagatctgatcccattccagcaatatcaccaacgttgtctccaacattgtcagcaatcacctgagaaacaggacaggcaatttcagtcatgaagcaccaaaaaaaacaatgaacaactatctctttactacttaattaggctttttctttttgcaacattctactgttgatagtctgaaaatagaattgtcagtttatcatgggcagttttttttttcttagggattacagtgtgcaactttatatgccagaaacttacagcagggttccgaggatcatcttcagggatgttcctttcaactttgccaacaagatcagcaccgacgtcagccgccttggtgtagatacctccacccacccttccaaacagagccattgaggatccaccaaggccatagccagtgatggactcaaagagaccctcccaatcatcgccatagtacatcttgaacaagtttatggcaatgtaaagcaccagaagcccatttgatgccagcaagaatcccatcaccgctcccgaacggaacgcggtgatgaaggccttgccaacacccttcctcgcctccagggtggtccgcgcatttgcgtaagtcgcaatcttcatcccgaggaagccagaaaccactgaggtgatggctccaagcaggaaggagacggtgctgaacagggcattgaacagagcaggcttacactccttgtccttgctgtatgtgcaggggtgggtctttgtgctgaatccctcgacggagccgaggaagaggaagatcaccaccgcgaatatcgacatgaaaacgccaacgtattggtattcggtgaaaaggaacgatgttgctcctgctcatagtaggattaatgtcagataattacactcaaagtgctgtgacttatcagtaacattcacacttgtgtacaactccggctatatttaatgaaatcggcacactctaaatgccaattcggtaaaaaaaaaaattgtaacttatcagtaacatcaattaaccaatgtaaaatgtacacatgttgaatggttttttttttttgtggtgatattgaactataattatcctctcggtagtaggtccagatggggcccttgagtgactttttagggaggaaagtaggcgttccagtatcctccatgccagttcaagacccaaaagtgctacacgttcaatggatgaacattgatgccatcaactatacgtcatttagcatcatggctgatttaaaaagatcgaatttttcaaggttataacatcaaccgtgcaaattaacattttgcattcatgaactgatgattaattaacataggcctaactaagcgaaaatttcctactttcaacatatttgcaaattgtaaacttaacagtgacctaacaataatctacgtcggggacggaagacgactaccatcacaataaacgattattattattcaaacaaaaaaaaacaaagaagaatcgattttattttaggtaccaaaactccatgcccgtgtggtgtgcctaaccgcagaggcaggaaatgtaaaccattttcattatctaataacaagaatcaactttttttttcttcaattgtgcaagttaagaactactcccacaaaaaaatatatatactttttttccgaacaaaaaaatggaaaaaaaaattgcagaaagcaaacgccatgtatatgccacgtggaagcaagcaaccgacgaagcgaaagaactaagtaagtgtagtacagtagaagcgaggctgctctgctcagtgctcaccttcagcgatggcgttctgtatctcggcgcacttggcgacgacgttgtggtcgttgagcccttcctcctcctcgatcagcgagtcgccgtacccgtccttgctcctcgacgctcccggctgcgacggcgccagcttgacccgggcgaccagcacccactgcgcgatggagaacccgatcccgatgatggcggcgatcgggatcagcacctcggtggccacatccgacaggatcgccatggccacaaaccctcctcgacctgctacctgctgctgctctctctctctctctctctgtgtctctctctctataccgctgtactctctctctcctctttctctctctggagattcttggaggtgaggtctcttatatagctgggtgggtggaggtggagctgcctggtttgggcgagaggtagaagacgagcagcggagagggagtgcgtgggttgttttgcaattctatgttttttccaagggtgtaattgtaaatattcttgatggatcgagtgggctgcgatttctgggcccttttgccaggctcacactgccacgtgggcccgaaacgcacctgactggctaacatgtgtctttctggactttgtaggcagaagataataatacgtagtccaaagataagcatgatcctactaatccagaatctcactgtccgaaatccgaatcttacagcgggatttgtttcttgcttagaatgttagattgttccaagctcaattgggcgtacgtatcactagaaatgaatttgatttgtgtgattcgttcgaaattcaaacaattcacccggtttaagccatcaaggtaattggcttctaatggcactatgatgttcttcttcttcgatttcctaatccctcttgaaaggatgacgtatttgcaaattgcgcgattgataagcaatggaattctcggcttccttaaagaatcagaccataaccaatgagactttcccgtgtgctacatcaacagttttatgcgatagttgttgtaattaagcgtgtctagctcgcagtaggacgagctaatcatattcacatatgtgccgatcgaataattaacgtcaaactaaacttgacactcggattttaggcccctttaattgtgttcccagagcacaacttcgatttctccccgtatatatttgattatgcttggctagtattgcgtccaaagagtaaataatttaactcggtcctcgcagcctgcgacaaacagtggtgtactggtctggtgtggttagaagcttataaacgaaagttgatagttattagaagctaaaacgaagtggattaaagaagataatcacagtgagatgatgatgagatcgacggccatgaacgctgcaagtggggggttaacttaattagcctggtaaaaaatgggaggagaaacagcggttgctgacggtgtgggacaaaagagtcgcggtttcagctgcagaatggaaattttaggccgtgcccgtccttatccgcatcgtttcgtcggcggcgcagcttttgctttcgggggtggattcctcggcgacgccgctggatttgccccgaatacgaccgactcgcacgaccggttttgcagtttgctccctctattgttttttttagagaagttttttttttttacccggcctctacatccaaccggatatatacggccacttaaataggaaacttagccccgcaaacaacctaatctgaaattcgctctatagaagatttgaacaacttagccccacaaacaacccaatctaaaattcgttccatatgagatttgaactcaggaccttagaatactacttaggttactgtaaccactaggctacggctacatgctccctctactgtaagagccagaaaactcacagccttattttttttcgcttgcacttatatttataagttagatttttaatttaaaatttattttaagaatattttatcaatgtttattttcaacttttacttttagatcattatgtatataaaagttttatttataaattattttttatttataaatatatcgtttagcttattttgtgaataagtcaaacgatagcttgacggctcagtcacgggtatactagtggtaaattatttttgaaggggatactagtagtaaaatgaagtggcactttcgtggccgagctcgcatggcacgtcgcacgcacgacatgaatacatgatccggcgagtggtctgttgtttttcagttcccgcggcaagagcagtttcaacgccaatgagacttcggacttgtttcatgctgctgccttgctggtgtagagaggcctgctgcatttggctagtgagtgagcgacacactgctgacactagtgaattagtgatgaacaaccatattatgtgtgggattggcgtcaaaaaatccgtctcgcgccaacatctgaaagccccggtgtggaatcgccttgcaaattgcagcgttcgcgaaggtacgtatggtcgatcgtcagggctgcttaacccaggattttgaaatttgaataatgctgccatgaattttgtagcggaagaattaattaaacttattttcctcactcatgaaactgttcgtgcaggtgcaggagcaatcgatctatcgagcaaaacaagaaccgccaccaccaccggatttgcctggatggcgacacacactacgaggtgagttagttgtttccgccgcgaaaaagctgagtcatcgcgtactttgtcgccgtcgtcgtggcatgcagccgccgccgagctcaccgtaccatcattcggtggtcgcttgttgccgataatttctgcccatgctgtgctgcttatgagtgtgagttgtgactcaactccagccagcggccagcgatttttcagacagcatttcgtccgaagctagtatgattgtatgagtgagtatagctagcttagcttggttttgctgacaacatgcatggtaatttaattaaggaattcaagtgtaaaatgcagctcgcgtttgtataatgtacttgctgtttcttaacagctttctaaatgaattcaagggcatgcaatgcagcttactcctacttaattagcagcttttactccaagttaagtgcccaacgaggaacactctacaaaggtcattgagaggcaaccaaaactagctaagctcagttctgctctgaactgaaccaaagagcagaaacgtcactgtcaccgcataagctatgtaaatgttcataaacaactagatcctcttctaccatttttcaatgcgagctgcaaaacaaacgtatgtaagtgatccaggtattgcgaaactagcggcacgacgatcaacgacgcttatgcacgtcacccctggtcccaaaaatccaacaaagcacaatgcatttcttcttcttcttctttattattgattggctgactgaacttttgatctcagaccaccgaattattattcctggttgctgatctctggacgatgtacgctggatatattaatatatacgtcttctccataacctaaaaagttattgggctggcttaatgttactattattattgttgtgtgaatccaggggcagaacacacacaatcttagcagttttgagggctgttttgaattgtttacataccctgacgaactccattctcaggcgaccactgtccatgaagccatgtagatgtattttggtcacatttccttgtcaagcatgacatgagcttcaacatgatgccggcgtataacatatgttacgaagtgtttgatccaacagatacagtgggctacacaagtcaacctatgtggaagctcgaaacatgatcttctccatcgccggcataatgccgttttttctttcttcagcgaaatgcagacgcaacactgcaagtctgcaacagggatgccaatgccaatgccaatgccgaagcccatgggctacctattgggctcaccaagacagggtaaatgctagagagatggccgactgacatgtgggtctgctattttttttcttttttctgactgatatgtaggacttgttaagtttttttttattgctatataagcgtcacgtagacgccacataagacgaagatcaagtcaacatatcacataggatgaaactgccgaagaaatatgctccggttttagcagttggagacgttctatgtatggtttaacggtcgggaatgcaaataaaactcgacttatagttgaggactgaaatatggaccttttccttaatctaaccgcgagagattgtctgaaccgtccaaattgggtttctttacgtgtcaacatacctgggcctcatcttcctacattttattggattgggccttgcagatcttcctgaacaaaactccctctggcctcttatggatgggcctcaaaactcagccatccacgtggtgtaggccgataaattaaaactccagcccatacacatgaatggacctaaatttagcccatactaattgccaaaccaggccacagtactttgttgcaactccgaactctgaattgcagctcccaatcattgtccggcgaaagagccgggtcatcatcacagtcacagatagctttgtctcacctaagagcaggtacaatagtctagtcggcaggctccaaaatattccatgttagcatattcttatatggaatgagaataagagcggttacaatagcaggctataagtcagctataaatatattttaaagagataaataaagagagagaagagtaataggctatagatttgtagccagctatagcacaaacttcaagacgtactgtgtgtatgacaggtagggccaggtattaatagtatagtaagcaactattgtatgaattgattcttctattggccataaatgatttggagttagtagttggctatactattaaacttgctctaactgaagagagagattgaagtgggcgactatttaagtgcccggcgatagcacgcgttgcacgataaaaaaatacattttgtgggccccacaaccaccctcatcggatctcatgtctcatacttgtgttcccacctatgttctgcttttcgccttttccttctccgctccggcgtgcgccgatgtgcttggttcttcgccggaatgttggccagcgtcacgtcactacgccggcaatgattcaccccaggagagttcgagagctccaccagctgatttcgagctcgcgctgatcgatctcatgcatgcgaaccgacgcccttgccgctggatcgatcttctctcggcacgaatcaagcttctcaaacctcaaaatcgagttcttgctgctggggtcgacgccctcccctccgaactgaagcgaatcgatgtatggatggagctccttaatctgtgactcgacataacccaccgctcggtttgctctggtatgaatcagccattgcctagctgcaaaacccatctttcttctttgctattctcttgttttttttcttttctctcttttttgcttccgtgtgaatggagatggataaaaggataaaccaccagtcattttcttttagttgctgtttctggtgttgatttcaatctaaagctgtgcgggagatgagctaggaaagcaaaaaccaaactctttctttttcttcatcggtagactactcacgctcatatgacagcacaaatagctacaaagatggagtacattcttgatcgtactgtgtatccaaaattaattgtttaatagcttctatgtagttagcacaatagccaatctattgtattagttagctgtaaaataatgtggcatttggtaccgccagcagtcggctatactattgaccttgctctaatctgtgtaattttcttctacttcttctttttctttttcttttctttctagtggtgtgtgtttatccaccactaatttccttgtgcttggaaagctgttccataatcctctcagcaatgagtgtattattgacttggtttcacgctatgaacttggcttgactgattggtggagacgcgaatatggggggctggattttgcatacggtacgcagcagaagacgcaggcatccaacgacagtgtgcttttgtgacagatgatgctgaaagcatgagaggtacaggtactggtacccgatgaaggccctgacggacaaaacgaaccggtcgaaagtcattgggagcgaacaaaaataagcactcaaaagaagacgcacgacgtgacaggaacccaatagcagtataggacgatcagttaagcacctcacgtatcgaccgttctttttccagatccgtgcgagatggaacggaaccgacatgtgtacggggatatatattactacttcctccgtgatacttactcatatctgcttcatccgtccataatataacaatttagaattaaataaaaaattagcataagacatgtccaaatgcattgtgccatagtattccatagtattccaccagttatttcgattttagattgctatattatgggacgctaaagaaagtagtaaattataatacttttaggttctgtatcacttatattggaattattagcatctttgctactaactccgtaataaaatataacaacttttaaatgtctattaagtacaactctagttccagcttcaaagctggaatctagttaaacagttttaactctacctaaaataagagtggggctagttgaagcgctcttccaagatgaactataatgatgaaagtgagtttaggcaactccgctccgagcccaacttctaaagttaattttagaaattactacatccgtcccaaaatataacaattttagttacgaatctagacacacaattatctagattcatagctaaaaatacttatattttgaaacggatggagtagatatctatcaaatggatccttatatttttactagaacggaaggattaagtgattcttgaacggtcaacaaagcatccgtgtatcacactaaatcacaatatcgtttgtacatcggttcagttttatggtcttttccttctttttatctaaattcgtaatactgattttatgttgttattatattttagaataatagatgtaccctggtacatgtgttgatgtaaaagcatcgttcataagacagacagtcagacagctcgcatatgctccagtttttttttcctagaaaatcgaatgttttcagcctccaaaactgtaaggactcgtaacattatccaggtagtacctagatttgcaaggctcggcgcacgcatcagcctttgcacgctatcccgcgtcacccattcattcggcggagacttgacgccgactcgaatcaaaccccgttctcttagcccatacgacacgaccgccgccgccgctgcaatccgcgcggaaaaacggcggaatcccacgagtcgtcacgggcgtctcggcgcacggctgttcaatccgtagcgtgtgtgcagcgcacggcacgacggagacgaagagaccgggtctgtggctcggtttctggctgcgcgcggcgcgactcggggaggggaataatccaaaagtatctgggattattccggaatcttggccgcctttctgtcctttcccttccaacctgttatttttgttcttttataacagcaagtttaaaagtgtagctcaccactagctccaaatcatctatatttaatttaatagctaattcatactatagccacctatgctgcactattaattttttttgccccacatatcatacataatatattgtatcttagaatccgttctacaattcgcttataaatatattagtccgctgcttttctcccttgtcggttattttacctcttctaacgagaaattctctcatggcctggccggctggcaccccaccacgttcagctgcaggaggagacggagatatctaatccttttttgcaagaccaacctcgcaaacgcttctatttgcgttgcttgtgaaaatcaacctgcgttgtcttgtgctcgcttgcttccgtttgacgcggtagctgaccagcctatgatatactcctacagccatacagataatggtagcagtatcaccacaagaatgtcccatctttcgtgtgtaaggcacgttagtctcaggaggaaaatgacggcactcattgacgataaattaacttgtgggtttagcttaactgttgctttgtgcgaacaaatcacgcgctacaatattaagggagaacatatgatgatagtgtagggtctaaaacttagtccccgttcgaatcctccgaagacgaagattaaaaacaggcacacaaaataaaaaatccattaacacgtgattaatgaagttttaattaaaccgagacaaaatctttatctttgtgagaaaaaagaacggggcctaatattccacgaaacgggatagattcgcgtgcaaatggtctccttttgcgtacaacccctcggattctctctcatattgacacaataacacaaatcaagccccctgacatttcggaaatcaacaaaaaaatcaggtccccgttgaagaaaccaacaaaagaacagaaaaaccccacacataaaacacgcgacaaccaccaccaccaccttcccccaacctccgatttccaaatccagttgtcttcttcttcccccgagccgcggccgcgttgccagctcagcttcgaacccccccccatttctctccgcttctccttctcctcccctcgcactcgcctccccaattttaaactcccttctctctctctctcgtcgtcgtcgtccaccgccgcaaaggggtctcgtctctctcgggggcgatggcggcgtcgtcgtcgtcgtcgtcgtcgatggcgtcgccgagggggaggtcgatccgggagacggtgctggagacggtggcggcgtaccaccagcagcagaggatgaggcgcaagttcaggaagagcctctcctacgcgggggagctgtcgtcggcggggcgcgcgcgaggggagggcggggcgtcctcgtcggcgtccaccacctcgctgtgtggccccgacgaggacgacgagcccttctgggaggaggaggagggcaccgtcgagctcgtccagctcggcgccaaccgggctaagaacgtgctcatcctcatgagcgacaccggcggcggccaccgcgcctccgccgaggctatcaaggacgccttccgcatcgagttcggcgacgattaccgggtgcgcggcctcctttttttttttttgctgctgtcgtctcgtgtgaaatcggcatggtagcgtaggctggaatctggccattgggaacacaagggttttgatttgttgtgctcgggattggcgttgtggcaggtcttcgtcaaggatctgtgcaaggatcacgcggggtggccgctgaacaacatggagagctcgtacaagttcatggtgaagcatgtgcagctatggaaggtggccttccacaccacatcgccgagatgggtccattgcttctacctcgccgcgctcgcctcattctatgccaagtacgccggatacttccctttcacggctcagcaatgtttttttaaaaaaaaaatcttactagaatgtttcattgtttcactgacagctttggcgatttgtgtttttcgtagttacgaattgttgttttttttttctgttgtttgctgcttccttggattgctaatcgctcatctaattgcagatttttgcaatggttcagcagttttgtcattatcgactaggcttataatttactctagagaagttttattagtgctagatattagcccgtgatgttacaggattagttttatattgccaattcttgagtgcaatcttcaactgtgaggttcttctttgacttgggatgctaaaatatctgttctgaatccatcgtaccacatagtgcgagtagtttgcttgaaatgcaaatctgaatatatggtaatattgagccgagatatgcaaccatgttggatctgttgaaccagagggttggagacaggaccagagagcatttcagaaaattcaattcctgccctgtgcatctacccaacatgcccacttggtcatcactcatatgctttcagaattgccagtctgtcctcgcataaaattgtttccaggtcatgatccacatattatgcatcataatagcacatgcaaactgttcatttgttggatcgctgtcagttctgtctaattccatgcttcagcaatctctgccaaccaattgacagtatagtcaatttaatatgtccgttcaagttttggatctattccgatgttgccattgattatatttgttgttagcgttctatgatcgaaattgcttcgagaaggcatcaaactaatgtaaaacagttcatttatagctctaacttgtggacccatgatcttaagctcatcgacccattatgtgtgtgagactttttctttacatcaagatggtacatggaacaccttttctgaatagcttattgtttgtgggtgaaggaaggttgaggctggactcaagaagtacaaaccagatattataattagtgtccaccccctcatgcaacacattcctctatgggtactcaaatggcaagggctacaaaatagagtggtctttgtcactgtcatcacagacctcaacacttgtcaccctacatggtacgtggaggctatccataagaaaaaacctggttatcttcttctgcaaaaacaattgtttctgttcaaaccattgaattaatcaatcggaaacattacaggttccatgctgatgtcaatagatgttactgcccatcggaagaagttgccaagagagcagcactggatgacctacaaccttctcaaatccgtgtgtttggccttccgattcggccatcattctgccgagccgttcttgttaaggtatgtgctccttatttaacttcaggactgttattccgatgcctgcgaattttttgtttcatatttgatctctcaaaaggtagatattcagtcgtggtattttacttgatctttcaataggtagatattcagtcgtggtattttatttgatcttgcagaatgtataggttatttatgcttttttatttaacatgcttaatgaatgctcttatcatggatttgtgctttgattaattgcaagcatgcataccccaaaagcattgctttaaatttaggatgtccattgactatattttaaaggaaaaatgacaaatttatgatagtgtggctgtacaatgatacacatcttaatacaaatgtgtagtatgcttttctatccactcaagtgttactttttttttaaaccaactcaccaggatgatttgaggaaggaacttgaattggatcctgagctgcctgcagtattgctgatgggaggtggagagggcatgggtcctgtcaagaagaccgcaaaagcccttggagagtcgttgtttgacaaggagcttggaaaaccaattggacagttaattgtcatttgtggtcggaacaaaacgctgagctcctcattgcaggctcttgaatggaaaataccaattaaggtatatgatagaaacgtgtgtttataataattctttttaagatgcagactgcttatcctcctatgttgaaacacatgttccttatcgacttcttttaacaaaaggttaggggatttgagacccagatggagaaatggatgggggcttgtgattgcattataacaaaggtatatccatgacattctatgattgttagcacgttatttcatacaaagatctctgtgtcattcttaaatcttaaatgttttttatgtttttatttgtctcaataggctggaccaggtaccatcgccgaagccttgattagagggttgcctatcatccttaatgacttcatacctggacaggttagggtctactaactttccgcggttattataaaagaacggtacgaatgtacatctatgttttatatggttattgactttgtggaccatacatatttaatactacaagggtgaatctcatgaaagttttatacgttaaataaaaaagatgtgtatgtgttttagaacttatttgtagcgtcagtgacactaatgttatgcagtgcacaaaataaatgattttttatcaagtgcgatatacagtatgtagcagttatatgatcacccagtggacatcatctaatgtaagtttgttctgcatggcaggaagttggcaatgtcccttatgttgtggacaatggtgctggtgtcttctccaaaagttctagggaaactgctaaacttgttgcccgctggtttggtccagattctgatgaactgaagaggatgtcagaaaaagcgttaaaactggctcagccagaagcggtgtttgatattgtcagagacatccatgagctatctcgggagcaaggggtgatttcacagatatccagttccttgacatcatcctttttcataccatcgccagaaaccacacctatacaacttatgtgaaaaatccgtgtatagctagaactgcattctttgacctcgtgaaatttgcctttgtcctacaatgtcctgaaaaagaaaaatatgtcaatggatttagctggtttgtttcatctgtctcacggcgttgggatgaggtaagcaggatttcgactgcttttcagtttgtggtctctcatggtagttatgggcttgtttgactgacagctgctcttgtgtaatatccatattcggtttttgttaaaatcattcgttcatatgattttttttaaaaaatcctgtcgtcctttgttcagagggaccagcgatgggctgcaaattgtacactgttagttgatgttggaaagtttaaacctctcgacttgtaacatatccattcatgtaagatccatcgtgactgtaaagtgtatgagacaatgacaaattgtgctagtgagagagtcatgtgcttgttgaaggacagtgagtgatctatcaattgagaattcttacctgcaccgtaaggagctaatgctggcctgcaacaatagaatgttcttttttttttgtctggccggccgcagttctgctttgctcactgagccatcagccatgccaaaacaattgttcgcagtgcttaccccatttaaaccaaaaaaaaaaaaacaatgtgttgttggagctgaccgtctgagatgcacgatgttgcaagagacaaacctaaaaactggatgttgaaacctacaattggagagagaccggacggtaagtgtggacatcgctctcacgacgcagcctaaacaagcaaaagcaaaacctgaacccaacggaatggatggatggatgggctgtgctgccttgtgcatctgcaactatattggtccgggccgagaagaacgcacttacgagtgaccgagcaagagcaggacgaggagtgagaggggccggaaggttttcctcacaatgatgaaggtccaccctttacaagacaaaagtggccatgatgcacgacgcctacataaaggaaaatcctttttcaggtatctgatgatgacgaatgatcagcgatgcactcatctgcctgaatgagatcttttcgagcctcaccatttgcctacaaataattagcagccgttaaatttttaagatatttttaatgtattattttcagcatttgccttaggggcacatatatacatttttttctgataaattatattttaatcactaataaaccgttttgacatataatcagctcggcaaggtcttcatctctgacgctctttcttcctggtagccattctatttcctttgatgtgttcttttctagtggtaatctaagaaattttttaatgatccacataaaacagtgcgaaggtttctatttatattagcaaaaaaatattacaagattacaactctaaaaggctctaatcatgaaaaggaaaagaaaacacaccaccacgtgctagtgacttcttagggcaagtactataagagcaggtacaatagcagctggtatgccggcgacatgcagaccacgtagaccggagcgatgatttggcagaaaaaaggcaggagagagagggcgagtcggcgactaatctgtcgcttggctgcattcgtgtttcgagaaaagtgggtcccgttggtgccatagatcagcagcggtgagataatctccagagagagaataggatgaatgaagaataaaatactactgcaatgaaaggatggtcagactggttagagcctgcttattgtgctggtaagctactaaaccaacttttgatgatatggtggaaattgcagccgaccgtggacgttactattgatcttgctctaagcatcttatcactaattccaagatgccatgtagactcaaatgatgatgtggaggagagaagagaagagagagaggagcagccacccctcgtgcaaggggcaacctccacacaagtttcaagaaatgggagagaaagagagaagtatattgggtctagtgtaagtagatgcaatctattgtatgtattacctctaaattaatgtgtagatgatttggacaaaattagatgtgaccacctcctctattataaaacttgcccttacacaccctaggagaagcactaacaccaagccgccgccgccgctatacgagaccaatcatcgttagtactactgagttgcaaatgtcgggccaagcactagctccaattccactggagctagtatcatcataaaattgaaccgtgcttctaaaggatgctactttcttaaaacaattatataaatttatcagaaaaaatatttgtttaagttaagttattcacatatatgtagccagtagccaccagtattatcataaaatcatttagttgttcagctattcatggaagaaaaaaagaggtccatgagcctgattgtcgctgtcagaaaggagccgtgggttgctgacagaggattccctcttcttgactgttcttgttacagtagcagaggcacccaggaaaattcgattcactagatgcggatctgttgggccaagagggagaggcgtaatcaaacacgggatcgcatgatatatcagttgctctcgtggccgtaatttttgcggcaactctccttgcatcttgcctttgacatttggacaaatttttcgtggccccagcgcgatctggaaactgccatccatctcgccaattgctgctgcagcaatcgcagaggcaatctttggatcgtgccagattaattgcgccctgtcacgctattacaactacgaccgaccatagcaccaatcacaaaaaccaattatttgctgagaagacgttcgtccaaaatcaaagtaaacacattaaactagatggcatatcttaatattaataacgatcaatatgagattaaactgatatattttaaaattagcgaagttatcacacacgacctcgttaaaagaataataaattccaaatttaaggcttaaacctggaaaattcccccctgctttgactgctaaactgctctttgaatcatggatccctccctatcgttgtccttacatcatttcctaccgaatttttacacgctaaaaaatttgttacatcatcattaacacttggatcggagccatcgtcgtcttctaaacaacaactctactacacaagaagctccctctacacagctctactactactatttacaaggggataaaaaatttatataggaaaaaggaaaaatgagacaaaatgccattcctaccaaccacgcgtgagcagcgagtggggcccgcgcgtcagtgagagggagctccgggctacggcgtggcgccccagagcacgtcggcgagcaccgtggcctcctccgccggcgacaccgcggcctcccggactcgccgcaggatctccagcttcgccgcgagcttctcccgctggctcagcccctcgccgacctccacctgcaccgcgaaccgcgccaccgcgctcacgaacggccgggccgacgacgtcgccgcgccgccgccgccgccgtcgtcggcgtcgtcgtcctcccgctggcatccgaggatcccggcgaagaagatgacgcctctgatgatcccgtggtctggcttctcttgcggggagaagtaggaatcgaaggtctcggagtcggagcgctggaggcagaggaggcgcttgacgaggccctcggcgaggagcgcgtcgacgatctccttgcgggcgtagtagccgacgcggagggcgaactccagcgcgagcgcgcggatgcgggggtccgcggagcagaggagggagacgagccgggggagctcgccgcgcgcgtggagctcgtccacgagcgggctgcggatggcggccacgagcccgttgagcgcgcgcagcggctccggcgaggcggacgcggacgcgaccagcgcgccgacggcgcgccccatcagcaccggcccgacgaacacgtccttgttgaagcggaccagcgcgagcaccgccgccgcgcagccgtccccgacgcccgggtccccgagcttcgcctccaccgccgcgaacacgccgtgccgcagcagcgcgcgctgcagccgcgggtcgaaccggcccagccgcgcctccagctccgcgagccgggcgcgcgccgcgtcgtccccacccgacgaccgcagcgcggccacgaggcgcgccacgttctcccggtcgatccacgcctggatctcgccggcgacgccgccagccgcgcgcgcgatccccctcctcgcctcgcaccgtcgccacctcccccgcaagcacccgacaaccccacccccaccacccccatccccggcaaaccgaatcgaccacgagagcgcgccaatccgcgcgagcagccggcgcagggtgccaagatcggggtcgccggcgaggagatcgtcggcgctggcatccagcgcgaggagcgcgtgcagcgcggggccatcgtcgccgccggcggccgcctccaccctccgcgcggcgtcgcgcagcgctcgaagcacccggaggaagtcctcctcctcctccatggaggagcaaaagagggaggagacgcgatatggctcgtttttaaccttgtcgcttgcgggcgcagtaaaaatcacgccgcgaaaattccccgcgatttttacagcgaccagttagttttagtgctagtagtagtagaactccagatcggatcggatactgtgagtgactgactgaccgatccgtcgtctcgtccggtggcggtggctaacatatagccccctccttaaaaaaaacaaacaaatacttatttagtattttaaaaaatactactattgttatttattttattgtgacttgatttatcatcgaatgttatgcaaatatttttttatttgtaaaaaaaattaaatgaaacgaatggttaaacgttggtcaaaaaatcaacagcgtcatatattaaaacacggagcgagtatgcaactggatatgatgaacttggatataagtatgtttagattatagtactagaatgtgccttttttttatgggacagagggactacgtgtggccatggcatgattttagttgactggcgcctcggatgaggcaagtttcacatttcacatggcattacgaaattcagttagaattcatgatacgaggagtagtatatgaccctgacttttgagaatttgcggtaatgatgataattaatttttgtttttgttttaacagttgactttgtacgccatgttcatcacatgtttctctaccagtagtactaatgttgggacgtgcaattaacaataatgctccagaacactgctgcagagtgcagatctgagcctgggttgacccgaagaaaaacaaaaaggataactgaatcgaaaatattcagtaggcaacagcatatacggatctcgacgggagaatattgaatatgtcccggctgttaatgccgtttttcgcagatgtgcaactggtctccggaaaccgaaaacgaccggctctaatcgtcatgacagaagttaccgcgtgatctctccaatcatctgtacttcccgatcttgataattttggccaccacgatgctgtgatgagttcagccgttgaccattcagtataccagtagtagtttggtctttggtagctggccgtcagacgtcggtgcgttacaactcgttgccgtcgttgctcccatctcgtgcgttgggcacttgagccccgtgattaggatacagagcaagtcatttcactccatcgaatacaaatttagtattcctcgatcgtaatacactaataccatgtattttgatctctatctattaaaaccgatgtaattatacttctaaaataatattacctatgatatttattaatatggtgtccatgtgatatttactctacaattataaaaacaagtgagggtccacgtatcatccttctcctatctctttttacttctctccccaatctctctcctcaattcaacggcatcaacagggtgggcaccgccgtgcagcatcaacagggtgggacgaaatgggccggcgatgagccgcggctagctgggccggcccaccgcgatgaggctatatgcacaggaggaggaggaagtgagccccgcaccaccaccgccgccgccatggcgctccgccgcatcaacctctggaagaatccgctcctcctcccccggccattctcctcgtcctcctcacccatcccgaccgctccgccggcgtcctccatcgacgacatccgtcgccagatcgagtccctcgccgcgaggggcgcccctcctggctcctccgccgcctcccgctccccaccggaacccggcgagggggaggggcgcaacccggagacctcgctcttccaggagatgcacgatcagatcccgatcgctccgtcgttccatcaccatcagtattcggtcgcctgctcttcgcggggacaacgcgagaaaggaggaggaggggagagaggagaattccgatgacacgatcggtacagtaccaggcactccggaggagcatccgggaaatccgactcgatcagaaaactaaggatgatatttaccactacaagacaagaaccagtaatctcgttcgcacattgcctgtttgattcaatacatttaagagtatgatcgatgatctttgtgtcattcttaaatcttaaatgtttcttttttatgtttttatttgtctcaataggctggaccaggtaccaacgccgcaggccttgattagaggcttgccctatcatcatccttaatgacttcatcgctggacaggttagggtactaactttctgcagttattataaatgaacgggtaaatataggtactatactcttggcatgagtgtacatatatgttttatatggttattgactttggccttgtttagttcatagttttttttcacaaaaatgtcacattgaatctttgacacatgcgtaaagtattaaatatagataaaaacaaaaacaaatcgtacagtttacatgaaaatcgcgagacgaattttttgagcctaattagtctataattagccataagtgctacagtaacctacatgtgctgatggcttaattagactcaaaagatttatctcgctgttccaaacgagttataaaattagtttttttatttgtgtccaaaaccctttccgacatccggtcaaacatccgatatgacaactaaaaattttcttttcccaaactaaacacagccaaagtggaccatctatctacttacttttattcaggatcttttgctgaaaagagattaggccgtgacattagattaaaacaaaccgttggataataactgtggcaaataactcaccgttggattgaatatgttcttttaaggctctaggtaagtgtggaaaaatagcaagtagtactcgtattagttcagtacatatttaatacttgaatctcatcatagttttatacgttaaataaaaaatatgggtatgtgttttagaacttatttgtagcttcagtgagactcatgttatgtagtgcaaaaaaaaaaagaatttttatcaagtgcaatatacagtatgtagcagttatatgatccaatggacatcgtctaatgtaagtttgttctgcgtggcaggaagttggcaatttcccttatgttctggacaatggtgctggtgagtggtgactccaaaagttagagggaactgctaaacttgttgcccgctggtttggtccagagtcttgaatttgtattttttttttattttctccaaacaataatactacttaggtcctgatggtttcaacttaagattattcattatcgtaatctagattattaaagattactgtaaactggattataataagctatagcccttttttcagcttaagattattgtaatttagattattaaactatattactataaacgggattataataagtcgacataaaataagctgttagctgtttgtttctttaaattactccatccatccataaaaattacacatattacttttgtcatcaagatcaataaaatattaaatcatcttggatgttacaaaattaagaagtgaatgcaagcatacaatcaataagtatttagataagtatttagataagtctttggatactactatcatgatgatctctccaatcatctgctacccccttcccccctccccgatctttgatatttatggccaccgcgatgctgtgctgagttgagccgttgactattcagtatacaatagcagttggtatttggtagctcgttgtcgtcgttgctcccgtccaatgcgttgggcacttgagcccatggtaagtccaatttaactctctcgaaatataggctcaatttgattcgtatatctgaatcataatattggatattttaatcagtaactattaaaacatgtgtaattttactttcagaatagtattgaccgtggtatcccaatcactaaagaaaataataaaaaaaagtgaaggtccacatgtcatcctccccctctatctcttttcttctctacccaatctctctctccccaactcttctcaacaatatcagtaggggtgggcaccaccttgttgcatcggcgccgactgtcattgaggaagtagctctcctctttatgcggcacgatgtcaacgacaaagatgatgatgacatggtggaaggcgtcgggagagatggtgagaaagggcgtcgagtgtagggaggaatcgccgttgcttttggcggttggctcatactccacacacactcatgcgcaccacctccatcacttcctgcgacttggacgaccccaacgtcattcgtctaatgtgcaacaaatgggccctccccaaggtagaggctaattgttgcaacctatcacttctcgttgtgatctcctcagtctgctttaagttgctcattgcaacgaggggctcgagctccagatggcgtccttgatctggcatggcaaggagcagcagaccaacatcagccacagaagtagcagttgtgcgttcttggcgttcactgagttggtgatagtgagcccatctctcgacttgctctctcctttcctaactgttgtggctgttgctacctcgatgttgcgtgcttcttcatggacccacccgcacccatgcctctacactcctgccgcgtgtcatcattgtcgctggccacgtccttcatcgccacggtggacccctccctctcctttgccgaccatgtgagggcgaggccgctgggatgacctgagttgccgtcgagcatatagcgatagggaaaaggatattggggagaaggaggctaacaagaggccccatgatttttatttttttccccttatcatttacatatgagacccacttttattttctgaccaggctaccatactaatacatgtggatcaaatcagtgaaaaacttctctcaaaacaaccaaggaggattggaataagtctacataaccccccaacctattgtcggatgattacttaacctcctcacctaacaaaccatgtatttaacctcctcattctaactaaaaccgtttaattaacctcttatggttgtttcgctccctggttctcttgattttctccggcaacaccttctcctctatcccttcaattacactgtaaatctataccatttttatggttcctaacattgccattgaagttcgaattgcatacctgtgcaataattcagtagcacgaacaaagtaagaggcacaaccgaattttttagtcaaaccatttacacacacatatatgctccacaatctttcacgaaacaagtagaaaaaataactaattagtagcattcagatccgacaaagcatggagtagcaagtatctctcacaaaacatggagacatgtagtggaatgcattcaattcttgattaaaaaaacaaatctctcatcttttcccaacacacatctttggttacagtttcatatgctggagtcaaacagtaggtgggtaagcctcgaagtgtttcaagctagtctagcccctcttcccgcacttttgttgcataagtggagcagagcttggagctgcaacacttggaggtagagagcttctgctagtgctctgttgggtgcccacatcaccctacaagatgaaggtgtctttgatacctggttcagcagtcgagggatatgaataaagatcgatataagtctactttgactcccttaaaaagtgacccgaatctaatccatgaccctaaactgcaaaaccagatatctcgaccccaaactattgaaaccggtgcaatttaactcccttggtggttttggagggcggtttcgctgacgtgtcgctgacgtggcggtgttgacctagtctatggggttgacatggcgcttaggtggcatttaaattaaaaacatatatgtgggacctgtttgtcattcacacacatacaaaattgtggggcccactgacatgtggccccacatgtcatcctctctctctttcttcttcctcccctcctcctcccttctctatttctttctctctctccccttcggccggctgcggggagcacggctggagcggcggcgggtgggggctagagtggtggcggccggcggaagctgaagcggcggcggcgggctggaggttccagagtggcaacaggcagctcgatggccggcaaggaggcgggagaggacggcagtgccgacgtcgacgccgacgagatcgagcggggagatggcggtcgacggcacgacacctaagcgcccgaaccccagtcctcacctccaccggcacggcaccctcaccggggaacgagcttcctgctccctccgccgcctcccgccgtccgtgataacaagatccggcgctctggcctctccgccgattgcaacaacaagatccgggcatctggcgtatgcgacaggctcacgacatggccaacatcgagcctgtcaagctggttaggggcgagggccaccatcgagctacaccatttagcattgcaacgacgacatcgtcaagtcattgctcgagctcgctgcgtggccgtcaactcccgtgccagccccatcatcaccaccaactcatcccccgttgcgtctccttcaactagtgctgctaaggccacaagcatcacaaaatccagaaataaaattgattcatttagcaactaaccagagataaaattgattgttagtaggtcgttcactatccactgaagaataggatgagtaggcagaggggagtacaccctcccggggatactcgtgcttgcgtcgagcggcactgacccggacatcacgtcggcgatgagctggctcaggtcgctggtgaagcaatcggtctgcagggcgagcgccatccgtcggcgctcccaccgccgccgccgcttcaacttccgccgctctggcccccacccgccgccgctccagcccgtgctcctccggtggcccggccagctaaaggggagagaaagagagaggagaggaagaggggaggaagaagaaagagagaggatgacaaggggggcccacatgtcagtgggccccacattttttaatgtgtgaatgacaaacggttcccacatatacatttttaattcaaatgtcacctaagtgacacgtcaacccacagactaggtcaataccgccacgtcaccgaaaccaccctccaaaactgccaagggagtcaaattgcaccggtttcgataattcgggggtcgagatatccggttttagggtttagggtcatggattagattcggctcactattaagggagtcaaagtggacttattccataaagatcctacaactagtaaagggagcgaaagtgaacttatttcctagacacggatgatgggtatcggtgacaagatgggccggaatgcaattctccgccgatgagccgcgactagctgggccggcccaccgcgttcttgcgcgggcgaggcacgcgtccgaatgctcgcccaatccaccactcgtcgccctccgcttcgcttctgctccccccccaaaaccctatgcagaggaggacgaagtgagccccggccaccgcccgccgccgccgccgccatggcgctccgccgcatcaacctccggaagaagccgctcctcctcttcccgcggcccttctcctcgtcctcctcacccaaccctcccttccctcctcccccgccaccgcccaacgaccgcgacgacgcctcaccaaagcccagcgagggggaggggcgcaacccggcggcctcgctcttccaggacttgcgcgaccggctcatgtccaccccctcgcatctgccgtcgcgccggatcccgaccgctccgccgccccgcccctcggggaacgccgagccggtggcctctatcgacgacatccgccgccagctcgagtcctaccgcggatccctcgccgcgaggggcgcccctcctggctcctcccccgacggcgccgccccctccttgctcgacctggtgaggagcacctcgtccccgacctcacctcagggccccaactccgggcacttctcatccctcgccgagagcttgcgcaatctcccctctggacggcagccgcaacagcggaggcagcctcgttcgacaaccccgtttttgtcccccactgcgcatcccatcttcgggagggagctcggggagaacgcgagaaaggcggaggggaaagaggagaattctgccattgagcttaagaaggaatacagctacgcagagctcgggaagaagctcggccaactgcgaccgtccggcgcagggaacgatggaaaggagtggttctcgcttgaggagctgcagggacggatcgccaagctcgcaaatttggacattgctgatgacatgcggttaggcgggcagtatgtggcactccggaagagcctcctgggaatccaagccgatcagaaaacaaaggatgatattaagaagacaagatccagtaatctcgttcgcacattgcctgtttgattcacctcttcgctgcttatgtgatgatgaaactgatatgtgcatctgttggcgttttattgtgcttggttgggagcagtgcagggattgtcatttttggcgaacattggtgggccggcaacgccgcaatacttgcagcatcctccacaggaggagttgctagagagggtgagattgacaatttgctgttccgtttcttttggttaccgaagaatttgctcctaaggttttgattggttactgcttttctcagtatttccatccagaccacatgtcgtcggaagagaagatgaagttagagctccagagggtgagggacgagtttaagatgtctgaaaatgactgtggctctgcgcgagttcaaagtgaatatggcccctcccttcctgagttaactgcaatttgataattctctgttgctaaacatgttctcagaaattagtaacactatcccttgcttttatacaaatattatgcagcatcaaccatgtcatccttactggcttactttattgtgccccatacccaaataacctttttatttcttttcacgccttttgtttaagggtgcacaatacacagaaaaatgagtacttcctctgtttcacaatgtaagactttctagcattgcccacattcatttagatgctaatgaatctagatatatgtatgtgggcaatgctagaaagtcttacattgtgaaacggagggagtagtttgtatggaagtagaacacctgcacttgtcagcatcttacactagcataatatactaacattgatgtcacaaggttaatatatgattgttgttgggtcagttgattgtttgcatgtcatgccttatttcttaattgtttttttcgtaggaaatgaacgttaccattgttttggtatgaagatttgtgttttaggagatactgaaagatgatctttgctcaagtagaatagtcatgaaaacaagtcaggctgatggaatattttgtctcgaattgaatcatttaggtttgattaccattatcatattaacagatcactataccattttctgccaaagagtgtagactatactctttcataagcaagtcagtgaccctttgtgatgcttagagctgtaggaagattggtaatatgtatacctgaaaacaaacatctctgtagagctgttcttctgggcagttttgatcaccctaaagaaagcctttcctttcatataaaatcttgcatatatctattgactgcctatgcatcttgaagctgttctgattcattttttcatatattgacattgaatactagctcttttggccttttggtatatgctgtgcatgtcactgatatgccccttcttcatgttacagttgcccaattgaccgtgaaaatcaagcatctgtcaactgttctacacaaaaaggtgagcacgtcttgaattccccttctgcatatggcgatattccttagatacagtgatgctacttttggattttatgaagttagtgtttgatgaaatgacacgtaaactttgtggtgcaggataaacattcgagaaaggggcttcaggatatggtccaaaggaggaagaagtacctcaagtacctgcgtagaactgactgggattcatattgtcttgtcctgtcgaagctgggtcttcgtgatgtaccggagtacaaagctcctgattacaagaacaaatccaccagtaaagccaaatctaagaagagcaagagcaagaaaagaaagatgaaagcataaatctgtaaccaagatcgtcttcacctctccctccctgcggccttgaactgcatggccagcaaggttgatgatcgaaaatacagacgctctgctcgaaatgggtttgatccattctctcagtgttgctcgaaatgggttcgatccagtctctcagtgctgtatcttttgtagtaataacaacggattgttaatccccttctcattttcctttttggtagcaatgtttcttatttttcatgagaaggtgcagccatcctgtaacagctacatgtgttttttttatagagttgagttctcccattctacttcctgggagaacgggattgatcattgatgaatactaataacttctcttattcactgtgtctgattccttgttatggaggtgatgctgggtggcaccacccaagttttaatcaataagattataattgtgtttttttattggactagcaaaagtaatgacaatcagaacgccagaatatctacaggaacagagccattcgtttatccattgaaaaaatatacttcatctgtttcagattataagtcgttttgactttgatcaagatcaaactgaccaaatttatagaaaaaaatagtaacattttcaacccaaaacaaatttattatgaaaatatatttaattattgatttgatgaaactaatttagtattataaatattactatatttgtttataaacttagttaaacttagaatagtttaactatgaccaaagttaaaacgtcttatattttaaaacagagggagtataaaagaaaaaaaaaagaagtagaagagagaagtttatgggccgcaaagaagaacaaaaagaaaaaagaagaaggacgggacgtaaacgaagcccctctctccaagctttgacgaaaaaggcctaaagcgagggagcacgaggaggaggaggaggactcatcgcttgccttccccgacgcacgcacgcactccactccgccctcctccaccgccgccgccgcctccgcacccagtaaaacccccacttcctccgccgccgccgccgccgccgccgccgcgggagagtggcgcgagggagcggcgggctgcccctgcccctatccctcgcccacgagctccagatccagctgcctctgcatccgcgggtctatatctatggaggcgagctcctcttccacctcctccccgccgccgccgccgccaccctccataccggcctccagcgcctgggctgacgcctcgccgctcctcgacgccgcgtgccgtggtatgcttcaagctctaggctaagctatatgggattgttctgtggcgtgctgggatcatacatgtagatttcggtatgtttggatgctggagtgggctacttcacgcattgtgctcccagtgcgatttgcattattccaagctgtgaaattgaaccttaaggagcagaaaaacaatgaattattccaagtctcttctgagtcagaatgccggcccagctgttcaagccttctatacgctctattgcaacaccattttggtatatcgcttgtggagctcacatacatgatgatttttgggtatattgcagattagtcgaggtcctagcgtcttctataattttttgatatattttaaaaaggtttattaaactagcccgaagagttccgatgagaggtatattggcatcaatggcattacaaactgcatacctggaaaaggtcattgtattaaagatgatagtggttctctaattgtttttcattgcatatggtttcttaggcatgcattgctgcacacagttttttttccttgtccaaagccaatatataaagtttatactttatagttgcttgttacaaactgtgcagtgctgataatgcaagatgtcgctgttggaacatggatgtaaatgtatctaaggttgtcatgtttttaggaggacatatagctaatgtaggttttttttttcactttgacttttctccttctaactctttcatgcttgtagatctccaggatggggaacttatacatggagagaactttagtctttttggtgcaatgtctgcattggaggtaagcgccacattatttctcttgttattttgattttgtttatcctctcttctatctagtgtatatagtgagtgtcgaggcccattatatacttgtttcttttaaattattgttttgtgcaacgaattgttattgtgatctatgcttggaaatctagttatgcactttttatgagaagcagtctctggacagtttcttcttgatgtggttgcatactaagtacttggagattgggtaatatatttagacaaagaagatcttctgactcatcttagttttcttggaaactacaacacttgtggcagtcatgacgaactctatgaagctatgctagcgaacacacttgccaatttaaaaaacctgaagcatgcttcttacataactccacaacaatcacaagtacaatcatattcatgataacactagagaaattaaaggaccagatgacagtttctgtcttcattctacaatttacagactgtccatttcagagttacccctggacctcactataactgtccactgttctaaaagaactttgcaagtttgtttatagaattataggattttctgtttattctcattttctccagtgcatatttggctgagcatttaacgagttaattgaaggatcagttatttttttttaatatgttgcttacttttagttctcagtgtctattccatcctaatatagataatggatcctaaaatggattgtggaattgagaaaagtggatactactccattgatgaagccatagaagatggtattgccccagttccacttagtttggacagaacacttgacattcaacgcactcttgatgtcatggatcatcttttctcatgcgaggtacttcagtgctaacatggatctaatatttttggctctcgttttgactaaaccggtatgatttaatacttctttcaggcaacatggcacaagggtcacactctagcacagactgtctttacatgtatctaccttatgagaatggagagaacttcatcacatgctatactaaatagcttttgcagaattttgcgtgctacctgttatgctgtggtttctgttgtttctactgcccgaactcatgaggtatttgccatttggaggttctctacactacagctatttccattgatcttgtttatcaactactcagacacaatttgtacttatgctaacataggagtcatgcatgtgggtttattcccataatctttttacaaaggattttatgtctctctattgatgaaaaatcctgcaccgtgaccacaatcatactacctcattatgagtgaattagtatatatgccatttttcatctttttgcttgcagaaatgttgatagagtaatatgtttgcattccttctgtattataccttaacaagaaaaatctgttctgtgagttgcagtactgtcattaatctgtacttttgttcaatatatcaaccaaatcacttgtgaaactccaaagatatattattctggtagcttcattacaactgggtactagtaccatgtgcagtcctttttgtatattgatgtaattgtgtcaggcaactgatgaatttttcatgtgaagtgtgctaatctgggacctctaaatcttgtgcatatgataatgagggacagctatagtattttagattcaaagtaattacataactatgcaccacttcttagtgcttttattgagtggccaaatcggttctttagggtgctttgttgatcaagatctgttcaaataactcatatgaggccgtgaggacacgaacatgatattcttacaagtataaaatttgagtgctatttactcctgttagcatgcgacacagttatcttttctttaatccttacaattccacttgttatataagatacaagttttacttgtctttctaggaggaggacctctttactatgtcttttgggctgcctttaagagatgaaggtgatgaaaagtgcctgtcaattcttaactcagttgaagagacaatagctcgtcaattacgtgcttgtaaagcccaagcattgtccaggaaaaagacactagaaggtatctgagtgccatgacaaaaatctttggacaacatgaagtgtgtattgtttcacactcatccaatcatgttcctgttatagtccagtaatataattgtcctcaatcattgcttcagtggtactgtagaagacttgaaactgagacattgtgttcaaaagttagtaaatattaagtttgaggcaagatgaaatgtagtagatgcatatttacctgttttattatatctagctattgctcgattcggaaattgcgcaaactaaattatttgcttcctccattaaattttcatggctgtagaactgaattttgataattagtttatttaatgaagttgtgaaataatgacaccttataaaaaaaatatggagttcctgtgtgtatttgaagtttctgaactgctaggtgcttgcatcttaaaatacttgtcgattagcttggctatcaaaaaataaagagaagggaaagggagcaatttaatttctttaaatgtttaatatgtttggacttttgcagatgtgggttttactctgttattatacattttatgaaatttattactgcaggtcttgaatccctacaggacaatcctgatctggaagaggattactgcagagcattgttatgcagattacgttttcgtaaggtctcaacccattttcctattcaattaattgtaaactttctttattcatgtacttgaaaaatgtttatcaataagcaggcaattttttttctgtttatggatgctctgttaactggtatctctgttgttgtaaaataagcatataaaatcgctgaaccagataaccaacctagcaccacatcaaaccattatttttggttcataacaatgatgcagtatgggtatcctgttgcatgctaagggcaattggtgaattgtactaaaaagtagtttcagactaatcgaggatgactccaggatagaaacagatgctatttgaaatgtctgtaaaaagctgtttgaatgtttattttcaaatgaagaaaaagtgatacatttcgctttcaattctatacatactgtgtcagccactaatgcattgacttcaattattgtttgttgataatacttactccatctaatgaggattattttctactcagcaccgaagatagcactgcattagtttataacttaagatcgagtagaggaagataataaccttccagttgttgatgatgactcccaaaaatgattcataagagagtatttaatatttaattctcaatgtcttcactctatcatgtgtttgtgtttgtgcagcatttctaccatgttgttacatgcttgaggaaacctcatggaagaggattggagttggcacagaagcatgttgcgtcatgtttgactgagctcagtttgatgctcaactctcgagatttcctcaggtcacagtccaacaatacacagcaacaaggcgatgaaatctgcacaaccgcatcaggtgttcgtcctgttggctttgatgctagcttaaacagcaggcttctgagtccagcaccaccacgtgctgtcaaattacttagctggagtgatgtaagttcagattttttcccctaatttactgctcagttttcctttctattgctgaattgcttcttgatatgcctttccaacttcaaaataatgttttgactataatttatattcaggcaataaggtactttgagaagcttctgcgcgatctagatatcatttgctcttcaccacttgatccggtgcttgagaatgtgcttcactttgttgtacagttccaaaaatcagtaccagatttggttcctagagcatttcttcaggtgggtcatacttagtgactgcagacataaacttttgtggaatattaactaatttgttcttcaatgttttaatatgctttactttgcactattactatggtatctcactaataaaaatgcctgctataataaaacaacgaaacatgtggctgatatattagatttagaaatattatgtagctttattgtttatcatgtcatctgttttgccattgcatatgtcttaatctgtatgtactattattcaaatgatagatctgtaaagtaccatatttacatatgagcctttgctcctcatttgggaaatatttgacaatgcagcaacttgttagccattctctgtaaattgtgtgtttaattgtgactctatacctttgagggattggcacaccatctgcttttgcttatatccctccataactaattttgtggatccacccatctttctttctacactataagtccttagattggtctgatggtgaattgctttaagctgaactcataattttggatgattctccttttcttcagttccgtgttttcttatcctgccatatgagtttgatagttcctctctttagtctacacactattacaattagtgtttctttcttgtattaacaaatgcaaaaatgactttgaagcagactttattagttcaagatggcaagctttatggtcgggacttgtcttgtgatgtgatttcaagggctttatcattaccagatattataggagataaggaattccagatgaatgagtttgtggtgcagctaggtcaggtcagccaccagaactatgcaatttgcttaatgatttctgtatctcatgcagtcatataaaattatgcctaaacatgtcttttgattaagtgcattgatggccttgtagttggtaatcaatttgcttaaaattctttgtacgaacactgcatggcaacggcgcaagcttgggaagagtttgcaggattggagtaccatttccatacaggtttgtgaaacaaataatgttattactgatttttttaaaattatttttccctttatggctttgggtaagtaacgaatgactgtatctaatctagcgatgcaagtaggctgagttgggctgggctgtcccactggcctaatagcactcatgtcttgatttaaaatctgattaatgtttcaacaaccacaaagaacagagtttagattgttcattgttgcaaatgagttgtggcatcagtgttgacttctacggattgttagttcctttttggtttgggactgagcatcccttgttcgtgacgaataactcttgtttgataatttatgcatgtgtagctcttgcacttgtaatactttacccctacagttttacttgatcaagacatcaaatatagctcttgcatatattataatgttttgagcttacatatattgcagttggaatttgcgttgaaaagagaattcggtgaaactagaaatgtcttaccgcatgaggtatttgtaacttaagtgcctgctgtgcttcttttgttaattgcatttgtttcacttggtttaatgtacatctggtggtggtgcagaacatgtgcatgagagtatcaaagcaacttctggtttggactcaggaacatacatattgggttgcttatcggtttctcatattgggttttgaacttgacctgtattctccgagtgaatattgtatggtgtactggtacatgtatgtggtcctcatgaagctgatagagcagatgcagttacgaattcttgctagtaatgaaaactgtaagttgtgatatcttttgtagtcttgtgactattttaaattcttagtttttgttacccagtagcctgcatagatgaatattgattcagagagtgtaagctgaagaggagataaatctgaagaaaattaaagtacattaacaaaaacatcatgttcttggggctctgaactatgaagaacttattatataatgccttgttctaaattcacaaaatgccatgcaattaattttatctctgctggactgttatttactgtatgcttctggttatatgttcagcacgaagaaaagggaaaaagaaaaaggatcattcaaaagactcctcaagggatacagcgtttccatcctcctgtctactgcttcagtgttatgttttactttcagaaggactttcaatggtacttgcatactccctccattttaatgtcaattcattacttgcttttgttctcaaacaaatgttgttttaggattttcaggcagcattttcccagttatccatattaatagtcattggaacatgaaactggagtttatagcattgagaggggtaaacatgccaaagaagacgaatttgctagcccattagtctttgtgttggaggctaagacaatgtgtataacataaaatgaagagtgtaaaaaaaaaaagctcccgaaagaacatattggcaaaaagaatgtatgttagatttcagttgtgccaataccttttacagctaaacattacttattttgaatgcagatgttggcggccctgaggaatgaaagcaattcattccaattaccaagcatcttcaatagtgagcaagaggtggactgggtttagcattctaagttctgatatccttttaagtattgtttaaacgcgtctgataaaatttttaccattctttccagagattcattcagcatttcgatcttctccagaaagcacgtctccctgagcacattacctactacagttttagggaatcagcttctcatgcatccatagcagtgagtttttggttgtaaaatcgtcttcctccagtttctcccattcttgttttaacttaaccttcattattttttcttgataacaggatctgaccaaatataacttttttaaagaaattcataagatcacgccgtccttgagaggcagttttgcaagtgaaccagaaaagctcgcggagatccgccagatagagcaggtggctgagcacaacagaatagccctaaacatcatcagccaagttggagctggtgatccatccctgagagtttcatttgagtttacacaccatccacactttgcagtcgcagttgtaaggagatcatagtttcctcttgaagaagagcaaaaattttcctacttcaccttcgttatcaatggcagacgagtcagctccaacacagactgctgctgtcttgttcattggttcgtccggctcccttatgtgctttaggttgtacaatgtacaccgtgtaacaattttgtagacaagaaaagaaaagctaaatgcttagtcactagatttattctgtgaaaacaattttttgagatgtttattctactaaacacgattatacaaatgctatgtaatttcagcgagaaacatttgctgacaaattgagttcaattcatgaactttacattgcaatgcaatttttagctgtaaaaccatgtttagtttttcttatatatatgattctgtatgatttattttgtttccattgcgaaccatgccatgtactgtagtaacaaactaacaacgatgtttctgtatgttcttatgtagtggtagtgtggtactgcctctgtctcaatataagtgcacttaatacaaggtttgacatatagtaggactaaagaaagttgtactgatgcgagttacattttgtggaaattttcgtgcgtgtacctttcgggcgacgggcgtgcaaccactacaagtctaaaaggcctgaacccccgacccgcctaatgctacattttcagtcttttgggcaagtggcacgtgggcgtgttccctttcctattttaaccaaactattatttcacgtatatctgattataagttgtctccctccgattttattttaattgacgttttagacaatgacacggtctacaaaatatatctttaatcttatttttctattataatatacaaaataaataaatacatgtttaattttattatagtgctttgaaagacaaatctatatatgttgttctaatttctttaaactaaatatttttaaagttattgataattaaagttataaaagtttgacctcaaccttgtccaaaacatcaattattatagaaccggagggagtaacgcctcaatataattagctgagtttaataaagcttcaattacaatttttgatttaaaaactataaaacttagcaataaaagagtaaaattttcatatatatatatatatatatatatatatatatatatattcttagtggctataacataaactacgatcaaaaccatcaaaatcaattttaaaattaagttttaaaatttaaattttagctaacgagtgataagctgaagtttcgaaagagcaggtacaataacatattactccatccattccaaattgatctacatatagttttttttaggttatttctaaatgatctacatatttgtgttcattcattaaatctattcgttatttgtgcattggagtaaatgaacattgatacatgcatccatgcacataagtatttataacccacatgcaatatcttgatttgctattggctagaaaatagtgagaatgatgcatgcattgagtttgttgctagagtaaatatagtatgagagagttattagcttttcttggtcttagtgtacctatgaaatatgtagatcaatttggaatggagggagtataagctagctataaattttttttagataataagctagctataaatatatttcaagaagataaaaaagaagagagaatagcagcggattacaaatttgtagccagctgcagtacggacttcaatatgcaatgtgtatgacaggtaggactatgtatttttcgccgggccggcaaatagccggccgatgtatattaagagtaagaaagggaatgtacaaggtagcatggtgcgtcaatgcaccaccattacagacataaaaagaaagctaaaatctcacagaatgagttgctacagagtgacacatggagctaacaagacctgcagctatccaagtttcccattcattccccatggcagaacagagctagggaatcgttgccgcgatcccttcgaacacccttgcgtttcgctctttccaaatcaaccaggttacaaggatcaccctcgcatcgaacgttttgcggtcaaccttagcaacagatttccgggctgcaagccaccaaacagcaaaatcagccgacggcgaggagcacgaaaggcccaggcgtgtgcgcacccgaccccaaatctgctgggtgtaagagtagcccatgaagatgtgctgacaggtttccccgtcgttggagcagagatggcacaccggagaaagcttccatccacggcgttgtaggttgtcggcagtgaggcaagcattgtgcacggcaagaaacataaagaacttacatctcaccggcgcacgagacttccaaataatcttgccaagagggcacctcgtcttgcctgccgagaatagtgaataggctgagcgcacggagaacacaccatccggagcaaccttccataatatctcatcccaactagcgaggtcaagggagattccagaaatcacatcccacaaagctaggtattcgcccaacgctggactgagaggccacctatgatatccgagacccaggaattatcgcagagagcagccgccactgacatcccactgttcttaacgaaagagaagaggataggtgccctgttttcccccgaaccgccatcgggcaatcaattgtcttttcaaagataggactatctattaacagtgtaatatatgtttatgataactattgtatgaattgactattaaattgactacagataactcagagcagtagtgggctatactattaaacttgcttaaaaaaagtgagatattattttgtatatctgacatatttttgccattgcaagatattttctgcgagcaatgatagcacaacgagtacaccgtactgtaccctctactgatgaaggacacagacagtaaagtcaagacacaagactggagaatggagaattaagcagcaggtcaggcaatttaacttccttaattcgtcggctcacctgtctgttgaaccaaaacggagcaaatatccgcaggtaacaggtgatcaatgcagcagaaattcagaaaccatctcaattagccagctcttctggacactttgaccttgaataataatattcccaagcaccccacctattaggctattactgtatgacgcaagggggacttctttgactttggtaatgtaataactccctccgtattttaatgtacgacgccgttgacttttaaccaacgtttgacaattcgttttatttaaaaagtttatgttattatcatttattttaccgtgacttgatttatcattaaatattctttaagcatgatataaatatttttatatttacacaaaaattttgaataagacgaatggttggttaaaaagtcaacggcgtcatacattaacggagggagcaaaagttttgcaaatttcaccccttaacaagctgactctgttactacgacgcagcccttgtttgactcggacttccattgtgcgttcttgacctttcctgcattctctttgttaattagtaatattattttttttgaagaaaatgcattttattacatgtatggtaggagtaggtaggtagacgtcacgtacaatttatttaagtagtatatgttcctgcatcttcgttaatctaatggctgcagtagagcaatcccgtgatctctaacatctgcatttgaataagacatcaaaaaaaaaacatttgtatttgaataacaatatcaatctatcattatacataaacaagtgtgtatgattccaactaatcgaaaagtttcgtaagttcggcgagagatcgagactgcgttagcccaattgaccacgtgagaacatgcacactgcagcaccgccccgatggaaccttccgagctttacgaccaactgtaatcaactcctcttaaaaacctcaattattttgcggaggcgtcgccgtctcctacaggaaaaagcggagcatttgcgtgctcgggcgcacaagcaacagagcagcagattcgcggattcgatcggacacagcgtcaaatgcaggtcacctgagcagtaatcccggcaagccggcgacacctttgctcatcttcgccgctgtcgtcgccatcgccgtctttcgatccaagagaagaggtaaagatgagagaaagatactacctccgtcttaatagtgtccaatatttaaccatctgtctcatttaaaagattataaaaaatagagtaaatttcacaaaactacatattttatggtccaagttacagaaaaccacacgcactttgacacttgtcacttgagtacatatattttggtagtgtagtttcacaaaactacactctcgatgtatagattcacccacgagatgatgtggctgtttcacctaggataagtatatggcatcctattaacagccatcgcacgaaattaatatgatgccacgtcctcatactagatgaaacaaccacgtcgtcatatcacgagtgaatccattcatcgatagtgtggttttgtgaaactaaactaccaaaatatatatatttaagtaccaagtgtcaaaatatgtgtggttttctacaacttgaaccataaaatatgtagttttgtaaaattaactctaaaaaataaaagatagtcaatataaagtattgtccacattttatcaactaataataataaatactaatcataacttttttaaataagataaaagatatatgaaaattcacaactgtatttatattaggacagatgtagtacgaaagaatcgatgtagagaaaaaggaaatgttcttctgattttctttatccaagcgtaggaaatactatcctttaacatggatcatttacatgtaaatccattaattcgggaaaaaaaagattaggtgagaagtcgatatttgcatgggaattaaagaaagaaagaaagggatttggtcaagggggaggaaggaggctgacgcgcgggaacacgtgtgagccagcacgtgaccacgcggcgaattcgcctctttccttccgcttccgcctacctcacctcaccttagctcacacgaccaagaactctcttcttttctgtcacttctcttccattcctgaggaggaagaacccaactgcatcttgcctggatactcctagcttgcagagtcttctgttctgcaactctgaagaccctgatcgatcggtgccattcttttttgctttccttcgtcaggtttgttcatctctgaacatgtttggcacaattagctttgatacatctgggataaagtttcatttcctttttgcagtgttcctgccttttctacctttttcgctctttgttcttgcgactaatggggctacagatcgttgatttatggttgccaaaattgactatgtacttgggaattcagtgcgcttgtggtttcttgtcagaaattagcatcccttgctcttgctggtttctttctttctttctgcagtttgtaacgagatgtaggttcagagcaattccaacagctctcctcttgtttttgtttcgcagcccatcttttttgggagtgtttgtttaatcagttggtgatcttcagccgtcctagctaatttgaatcgtttttgagtttcttgtttgcctagtttttgtgccgttttttaggatgctgttgcagagacgttattatctgctcctgtacgttggccgagtccgcgaattttggtgaaaatttgttctctcttgctccgtttatatatggctctttctgatcgccatctttcttctcatatcattttctcccaagagaagtaacctcggttctttctatgctttgttgcctagattgctacaacagaagtttctcagtggtgagcttgccttggtttattagcccacttcttgtttccccaatttattcacccaatcttttataactctgaacttttgagtaaatgtttgattatttggatatctttattcatgtaaatcatttcagatcggtggtagcggcaacaattgttgttgttgttgttctattcatttctgattttctttaacaacatgttgtgttgattccttgcagttcaatcgtagctctctgtgatacaaaaaaaaaatggctgggggtggaacgagcatcaggaagtatgttggagccctaaaggacacaacaaccgtaagcatagcaaaagtgaacagcgattataaggtaacaatgatcataatgtgttatagactcttattcctacataatggccttgattagatatctttggtttgtgctctttgtgacaggatttggatattgctattgtgaaggccacaaaccatgtcgagaatctaccaaaggagaagtacataagaggtggtgactcaatgctttatctgaactgcaaacactggttttttctactgaacgatgagaacactactaattatcagtcatgtttactcatgcacttcttctgtttgcagatatcttttatcatctctctgctggaagggctcgagcagatgtagcatactgcatccgtgctcttggtaggcgtctttcaaagacacgcaactgggcggtatgtgtactacacatttttctattatccataaattgcgtctttcagatcagtacttcaattctctgactctatctattccatagcatatttctcagcaggagttattgcaaatattagctattgatgtcggtgccaataaacctttcaataccctgacaaatgatctctgtatatttttaccttgcgttgaataaaaaatatttcagggtgctagccaatagacaaaattgatgacattgtacctatgatctatgaactgattatttgaaatttttctcaggttgcacttaagaccttaatcgtcatacaccgtgccctacgggaagttgatcccactttccgtgatgagctcattagctatggaagatccagtacacatatgcttcatttgtcctactttaaggatgattcaagtgcagaaggtaatagctactaatttcaccctttcccagatcttagtattggaacttatgattacttgttcgctatcttagtattggaacttatgattacttgttcgcttgtgcagcttgggattattctgcatgggttcgcaattatgcattgtacttagaagagagactagaatctttccgtgtactgaaatatgacgttgaaaaagatccaccggtaagtaatctaatgtgaatcacattgggtgtttctcttctgtggaccgtggtgtgccatgtttgtttgttgaacatatttgttttaagaagacttaatttggaagtcaaaaccacacgaaccagttgtatgacgaattagattgccacactaatatatatattgtcaatgttatatatgcattatcgaagaatcaaaattcataatatgtagtacaggatgtcaatgggttactttagcatcttgtttatgacaaatatgttactcacagagaactcgagacctcgacacggttggtttgcttgaacaactgccagcactacagcagcttctttttcggctactcggttgccaggtgattcattatttgtcacactgtaaaagaatgctgctatttatatatttctgaggtgtcatgaaattttaaaggttccttgctaacttcttttcagccacaagggtcatcatcttataacaacataatccagcatgcactttcaatggtgagaactcataatatctctgagtagtgtactagagtgaataatctgagtattccttgacattgttttctgtgttaatggaaggttgctctagagagtgttaggatccatacagctatcaacgatgggatactgaatctggttgacaaggtaccaataactagcttatcgataaatataagcttgtacactttttatcatttctcttaatccactgataacttttgcacaatgcagttctttgagatgcaaagggatgatgctcttagagcccttgacttattcaaaagagcaattaaccaggtaaattttcttttatctactgttagacaaataattatttgttccattttattaatctttaaatatttaatatatcttctaccccagaaattttgcattgagtgactacataacatgtctgcgtttcctaaaattgttccttttctatttggacaggcgggacaactttctgaattttatgaaatgtgtaaaaccatacatattgggcgtggcgagaggttcttaaaaattgaactggtatggttggaattgccattgttattactgtgtttttatttttattatgattttaacttgtgatatcctattggacgtatacagcctccgacctcattcctgcaagctatggaggagtatgtgagagatgcaccccttgcttcaataaaccaaagaaatcaggtttggaactactaaaattagtaacacatggcccttcaactagtttccttgtaattaaatactaaaaaatgatataaatgtatttaatggaatatttttggacgttttatatgttcttaggctgtactagcaatagagtacaaaagaaaaccagaggatgaagaatcatcaagttcagctcctctgccgccgcctccagtatcaacttcagaatctgaacctgaacctgagcctgagccagttaaagaagtctcacccgtacatgagccaaccgatttgctggtaatattccgtgcttctgcttaatgttgaaacctgcaagttagcttattttgaattcttgtaatatttttcatccccacttggtagggaatgaatgaaccgacccctgacgtgtcaaaaatcgaccaaaagaattctttggctttagcaattgttcaaccaggtaaacatcttacctatgcacttcagctattatcttaccaagttttttaaaagaaaaatggaaaatcaagtactaatatgcccctaatttttttttcagacaatacaccaaaagccgctgctcctactactgaaaacgttgccactagctgggagttggcacttgtcgccgcgccaagttcaaatggcaatgctgccacctcgaacaaactggtacatatatattcagagaaatttgtctaaatttgctttattggaaccctctgaaaccacactaaacacgcttaacctgaaacttcacttcaacaacaggctggtgggctggacttgctcacccttgacagcctatacaacgaggcgcaccgacaagcgcaacagaacgcaagctacaacccctgggaggcagcagccccagcatcatctggcccaatgatgcagcagccaatgcagaacccgttctacgcctcgaacgccattgctccgcccttaaacgtgcagatggccgccatggcgcagcagcagcagcatatgttcatgctccagcagcagcaacaacagtatgatcagcagcagcagcagatgatgatgatgatgggaaggcaaccgtatgatcagcagcaaggctcttcttccaatccgtttgctagtccatacatgtctgcaggagttcacccgtacggtccggggatgcagctccatgccggcaattcgtacacatactctgggacaggcatgatgtagagtgacacaccatctgctgcttgtttggcagttttttttttttcattttatcgcatttttttgggcggtttatcaaatgtgattttaggaggattagatcggtagatgggacctggtatagagtcaagatgagcattgccgtcgaagttttttccctgctctttgctgacaaagagggcactggagttctctaaaaaaagaaagcagttgtgaagggttgtatacattgaaatctaatgtaacaactgctgctatttctgaaacataagatgtaaatgaacattatgtttcatgatctgcgtgaattggtcggtagaactgccatttcctacaaacaaacaagctgcaggccagaataggataggccctttgattgttcagacttcagagtgactggactctgaagaagccgcgtgtacctgcattgatgggcgatgtgtatgcacggacggcacggacggcacggcgaatcgtgccgtgccatgcgatgcggccgcccaggcagagcgccgtgccggagcggacagggaggtgtcaactgctacagttaatgcaggcaaagctagtgtccatcaacatctcataccgacaaaaatcacaaaaactaatcatgattcaagttgaaatcagccggaggacataaccaaaccatcttacaccgaatttcaaatttgtacatgcaatctgaacatgtaagggttcacgctactgaatgggaccacaggagccaaggcttcgacagtatctgtacacaagtttacggctgcttcatcgcaaggtattaaccacgcgggcaagagaaggggcgtaccgatcgatcagaacgcgctgctgtactcgtcttcgctgttcatttgaatcagccacaggatcgcgacgccaaagaccaggaaagaagatagctccatcgtgagcgctccccatccaatgacgccggcatgcttcaggatcgacgggatggcgatgctccccactatcgatgcgcccgtcaagaattttgtgaagctcacccaactgcagtgaaatcagatcagtgtgaaacaaggattatttttaagtggatctcccccactaacaacaacatgtgcatgctcaagtcaatagtcatatggtctggtaaacagagttacttagtactagctagtaaatggaacgcaaagattcaacagaataactaacagtcgtttctgaatctctaatttgagaatgtttgtcaggaattttattaaatcagaactggtagtagtaccatgagtgcaggtagcaaggaaaggtaaaaatgaaatagcaatgactcctggtaaggaaggattatcacttacgtatcgccatcattagacatcattgaggggctgttggagcccaggaaaaatatgaggggcattggtagtatgaggtacataagaactgcagaaaatgacattgacaacttataagtttcacaaaaacaaaatatattgctgatgtaaaccaaattttctaacctgttagcattggccaccagttgttatacagagcacaggcctgaagatgatacagtcacaggatttagacaatgatcagaaaagataaaaaaaaagtaataagttggtgtgaaggtaataaacttggatgcttaccagaatctgcaatacaattccaccagaaaccagtattgcaagaagcgcaagtcttccactgtgcaaacatgtcctcatactacgcgccattgtttcccttgcagctgttcagattcagtttccggaataggaacaggtagataagcaatgtattgttttgaagtgaaatgagaaacacattacagacagtacatggagtaaagcccaaaattgccacagaaaccacctcgaatataatgtttagtgtttgctttggccaacttatcacaaaaacagttgtgcaagaaaagtatgctgtttgaactggcgaattgccagctccccagcacaagcacatgattcaaatcgaacaagtttcccagccaaagaactacggtggatggagaatagaggctgaatcacaacaatatggttgtagagtacagaacagagaaatccacctagagtaatgctccctcaacatagtctaaaacaaccagacaccagaccttgttttcagtcggccttcaacatatgaattggtcataattctgtcagacacacacatgatttgcagactcgaagataaacaaaaacagccatgtgcacagcaaaaggaacgaacagagcgaaccgcaaacgcccacaagagtgttcatgtgaacagctcaccagcgtgtcgtaatcaatacaattctgcatgaattggcccggcaagagaacttatacgaaaaattgctcataaatgtgaacttgctaaaaagttactactagctagataagtgcaaaaccaatcattccacatgtacgcaacctaggtgggtaatatgtaattcttctcccaggctatcatccaattcagagattcagatctgattcaggaacagaccaaccaatcattccctccctctctctctctagggccgcaacctgcagcgattcaaccagtagctacgcaaggcaaggaggaagaaaggaggggagacggatgcatactctggccgcgtcccgcggaaacgctccccaggcggcctccgccgccgccgcgcgccggcgcacgcgaagggacggcggcgaggcggcgacgagtgggcgcggatgccgaggcggcgaggcgaggcgcggagcggaggaatttcccggcgtcgtaggggaggaggaagaggcgagttggattgaagggttggtgatgcggtggacggccccgctgattaggcaaaggtaatttagtcgaggataatcgattgattagctggctaatcaaggagaaaatacccaaatatgatacgatgaatctgctaaagtatacttagggtgtgtttaagagtagagaaaaaaagttagaagatatgcaaaacgagagtataattatttaaatattaattatctaaaatttaaataataaagtaatataatataattttttaagtaactttcttatataatttttttattaggatataccgtttagcaatttaaaaaatgtgatagtataaaatgagtgctcggaacgaatgcaaccatagtaccaatacttccttcgctttaaattataagtcatttgatagttaaacttttttaaatttgaacaaatttttaaatgaaatataagaacatttttaatattgaaaaacaatgtatcaaaattaatttaatgttgaatataatgaaactttggtgttatacatgttgctattttttctatatcatgatcaaatccaaataactttaactaatagaaaaagtcaaatgatttataatataaaacggatatagtacttacttatattatgttatgtttattttttttaataattcaatttggcttttcacatattcccaagtcccaatccaagctaacgaggacgcatctcgcgtcttcttctccaccaacgacgtcaccaccttcaccgaaaaggattattagtagtagcccatgatgaggcaaagagccagccaatcaccacacgcgtaacgtcacttacaggtgggccccgaaatcgaccgccacttacatgtgggccccaaagttaagcgacacaaaaaaaacctgcactcccagtctgcgactgcaactgcatcatatatcatactatatacctcctcgcccatcaaataccaagtccattcctcctctgtttcttccttccaccacgcgatcagcgcgcgcgcgagagagagagagagagagggagaaggcgcgatcgcaatggggaggatccagtacgcggcggtggcgaggggggcggtggtgatggcggagcacggcgacgcggcgttccccaacgccggggccgtcgcgcggcagatcctcgaccgcctctccgccggcgatggcggcggcggcggcgattgcaacatctcctacacgcaggatctccacgtgttccacgtcaagcgcaccgacggcgtcaccgcgctctgcatggccgacgacgccgccggacgtaagtaacacccccatggcatccgcatcgccatcgatcaatcaacgcgtcgttatcgtcgtggttggccccccgctcgatagtcttctcccgccgcagcgaagtctctggatctggacgagatcaggatcagtagcggtgatgccagagtctcgtctcgcgtgttcaggatcttgtctcgatcaatgtaatatgggggtggagtgagattgaaccgtgggaaatgggaaaattatttgatcattgcaattgccgttttcatgatggactattggattatttgatcagaacttcgctgtttttttaaaaaaaaacattgggatcgaaactttttttttaaaaaaaagatagaaaaatgtagtactcacttttgtttatcacacgccactcattttgtagttatgatattttcttttggtgataactgtgtgcatatcttccatcttgcaggacggattcccttcgcgtttcttgaggatatccacggaaggtttgtcaagacgtatggtcgtgctgctctcactgctcttgcttatgcgatgaatgatgagttctcgagggttttgggccaacaaatggactactactcaaacgatcccaacgcagatagaatatctcggatgagaggtgaaatggatcaggttggctcccctctatcttctgtttttcacatcagtaaactgaattttactagtatacaaacttttactgtacattctgttcatgttaattaacctttacagtacttctcgtatctttctgtagttaaattaagagttgatggtgcctcttataagttcagaaagaatgatattaacgaaaatttcttgcaggtccggaatgttatgatcgacaacattgacaaagtactcgagagaggtgatcgtctggagctgttggtcgacaagactgcaactatgcaagggaacacgatgcgatttaaacgacaagctcgccgcttcagaaacaccgtctggtggagaaatgtcaagctcacgtacgtacattaccaccattcggtacaccaaacaccctacgaacacttgcccttgcccttctgcttgcctacgtcattatgggttttcgttttcatgctccataccgaaaactcattaatcattatatacttcgactattaggttgcttcagcttaagcaattgacatatgatatgatagcctctctcacatggttttcctattctttgcagagccgcatcggtattcatccttcttgtaataatatacatagtgcttgtatatatgtgccacggcttcaccttaccgtcttgtatttagtacacctctatacgaagcttcattccgatcctaaaattgtcccaggttccttgtaagagaagctccgctgttgcaatttttcttccaacataaaagaggcaatgttgcattgcttgatcttgtaattttttgcacccactcctggaagctcaccaatgttgccaacttgccatctaaccatggttcacatctatcgaagaaaatggcactttctaagttgctcctcgactgccaatattttactgcaaataccctatagtggatttgcccgatcttgtctgtcttggttctcctcgagacagcaattacagtccagttaaaacattgtcaattgcccaagatttatcatgagtaaaggactcgtttaatccaaggaagcatcaatgccagccgagtaatcctaaatcgtccagtattcgaattgccagttttgacacgcaagaagccaaacacacgtgaacgcaattacgcaagggacgagtcaacttctatcagtatatatcaagcagagaaggaacagcgcaagacatgtttcgtacaatcacatcttgaaccacacaaatatataaaacggtagtgttacaaacaaacaattttggacggagcgtttccttaggcctaataactctctcggaagaattaagcgtaataatttaaactggacttctttttggcttgcacttgtatgatcccttcattgaaatcctcgtgtgtcacctgcgtgaacgatggacaaggatcagccaaagcaatacattatgattgttcctatatacagttgcatgcgcttcaggattgacaaagtcaaagcagcaatttggtatacgctaataaatagactcgaaaattttgcaaccaaataccaaaccgacatgtgatggtctagaaatgccatagatctaatgtttatcactctatcccaggctccaaacctaatttatgtggggtactcatattccattgcttttaccaatggattgatcaggtcccgccaatccccaatatatataccagtaagttaccaaacaaattcacaagatcagaatgtaacacaaacctctgtagcatctcggcgtagggcaagcatgcctgcttctacacaaacggccttcagttgtgcaccattgaagtcgtccgtagatcgtgccaactcttcaaagttgacatcagggtttacattcatttttcttgaatggatctagagtaagaccacataaaataaagattgttttagttctggcagaacaaggatttattttatttttaaagaaagataatcaggtcagcaatttttggaacaagtagccaacacagatttcaggagacatacttgcaaaattctagctcgtgcttcttcggatggatgagggaactcaatttttcggtccagcctaccagacctcatcaaagcaggatcaagaatgtccgcgcgattagttgcagctatcacctgtagtccatggcacatccaaccattacttagataatatattaatgaagcattcataaagtattgatagataatggtcagtagaagcatgtctaagacttatcatttgcaattaaatgtatttctcattctattaagattaatgaattcaaaaccattttgtgccaaatcatcataacgatgacaatgaatggtttacagtttgcaaatattcagacttaagaaacaaataaaaatgctgacctttatcctctcgtcactactgaatccatctagctgattcagcaactccaacattgtgcgctgcacttctctgtcaccactaacttcactgtagcaggaaaaaattacagtttattatactgtgaacaataatatgtctagttgcatgcattgataaagacaatgctaaatgtacctatcaaaacgctttgttccaattgcgtcaatttcatcaataaaaatgatgcagggggatttctcctttgcaagctgaaaggcatcacggacaagctttgcaccatcaccgatgaacatctggaccaattcgcatagacattaatatgtatctagcagcaagcagaagaaccaataaaggaagaaaatagaccaacactggaccaaagcaatattcttctagattgcagtattataggctacagaggtaactggaaaaccaaagttccaacattccatctgatccttgtgccaagagataaggtgatatgagagtactagtcctaggctcatagcacatgaagtatgaaaagttctcaataattgaaacagaaggcttaaggaccctagcatcatttgagctttcatatatttgaattagcaggagcagggatatcacatagctttcaacagccttatcacagaaagtaagctacctggacaagctgtggaccagcaagtttcagaaatgtggcgttagtttgggcagcacatgcacgagccattagggtctttccagtgccaggtggtccgtacaaaagaacacctttcggggggcgaattcccaacttctgaaaccggtccttgtgagtcatgggcaatactattgcttcaacaagctcttgaatctgcattagacaatataaaagtagaacataagagagcagataacaatgaacaaacagcaactgatgaacacttatgagatatggaaatgaagttactgctacttacataacaacagaatggtgaccatcctaactaatgttttcatcattagatctttaaagtaaataaatacctgtttctcaaggccaccaatgtcattgtaatcctctgtaggcttttcatctacctccattgccttaacccgtgaatcatattctgaaggtagcgtgtctagtatcaagtagctgtctttgttgactccaaccaaatccccaggcttgagcttttcagggtcaacaagcccgattacaggaaggaatattgtctgcaattaaagtagtcaattaaacccatgcaggtatcaatacaaataaatttaattgagatgagaaacggtatatgcatggtaggagtattacacaactaagatttaggataagttggtatatcatgctctatgtatttggtggtatcaaatattcaagtccaaggaaagcatgaggcaaagaaaacagcaaatgaaatccgaagtggttatgattatcatgagtctccaaaatatagatcaagtaagaacttgactgcttgtttaatgattcatcagaaaggtagcagatgaccgtcaagtaagttgacttacttgtcttgtggatgtcttcaaaacaacgcattttcctttcctttgtgaatccagatcgatgttcgcaccatcctcttcagcctcatcctcggggttcatttccaatatctgaaataggaagtaagaacttgtaaatttgcccccacaatcttgcagaattagaactacgaagaattctgctctgacattctcaaggactcgaaaagacccaaaagtggtatacctttgccaatgaaatcataagagtttatgaaacaacatccacaaaccaactaagttaagatatcgagcacaccagcaatataataattaatgtaaagatggactacatcttgggtactttcaacatattgacaatttggcatgtttgttatctcaggaaaaggagcacaataaggtcaatatgtcctgaaattaagatctatgccattaatcactattcctaacacacatgacgcttagaatatgaaacatgggtaaagggcaattacaggggagtgaacagaaactagtacaaaatcatgaatatggcatcaacaaagtatacaacgaagtcaagctccaattttccagatcgatgtccagaaccgatctccgcacattaaaactacttgggccttaaattgaacatgaaatttcactggtaacccagtcaaagtggtgcgcgcacaaacctcgacgatgttgccgacaaggtaaggcagctgcttgttgagtttgatcttctcctggttctccttgatcttctccttgtaggattccacctcaaggttcgtccgctgcagctcatcctgaggcacccgatgagacaaacccccacaaatcagaccaaatcccatggaggagatcgctggggcaaaagctagggtttcccgcggaggcggagagagagagagagagcaaaccttgaggacgcgggtctcgttgtcgaggaggcgggttgccctgacgatgtcctccgtggacatggaggcgagctggtcgtcgtcggcgtcgtcgacggccatcgcggcggcggcggcgggcggcggcgacgacatcgctagggattttgcttcgacttggggaaggagttgatcgatgcggtttgcgttggtcagtttactgtagttatgaacccaaagctctacttcggctgtttgtagccttgtttgggtccgggtcgggttcagggatttgggggttgtttggttactattttttttaatgctaaattttggtaagttttggcatgactaattttggtaaggtaaagttacgtttagattgaagccaaaatagcctaataagttaactattgaaatggcctactttcttaagcatgccaaaatttggtttcaaaccaaaggtctgtttactttgatgccattttcaaccttaccaaattttggtaacgttgctaaaaaaaagtagatacatttagtttgctgccaaattttagtaactatataagaaatcctgacaaaaattttggtaatgccaaaatttggtaagttttttttcatcaaagtgaacaagccccaaatagacactaaacactattgaaattgccaaatattggtaaggccaatttaggggcctgttcactttgatgtcattttcaaccttaccaaattttggtaaagttgcgaaaaaaagtggctacatttagtttgctgccaaattttggtaactatataaaaaatcctaccaaaattttggtatggcaactatgctaaaattttagcaatgccaaattttggtaagtttttttttcgcatcaaagtgaacaagcctaggcctcaaaccaaaccaagccttggtgactttcccactctgaaactttccctgtttatgtatagaataaacaaatttatgtaaataaagtttactccctccgttaaaaaaaaacagtagtaagttattttctgggacagaggtaatatgcgtagaaactttgttctcaaatgaaaatcagagtgcaaactttatacttttattaaaaagagatgttaaaaaaaaatatgtgactgtagtagagcgttcgccgcatccaaagtgcatgcatcaaccctctgtgaggacttaagggtgtggaactccaacattttataatagaatactgataattttataacagtgattttacttacaacctttatattttttatattgttttttaactaaaatcttaatggtattaaaaagattaaaaacatgtaatacccttacagattttcccctaactttttatacttaatggtttttccgatatctccacatcgaacattgtgacatgaattttcacatattctgtcaaaagatgaggacaagatgaatcttcacatcgttaagtccttgaacataataaggacaacgcaagctttagttaaaaaaatagggaaaataaaaaaaataaagtaatggtaaaacaccattgaagttaaaaaaaaatgggacaaacaccgttgaaggcatgtagaccctcgttttattttggaaattagtgacaattaattagaaggatttaatgtctttgctaagtgttcgaaagattaaatggcaaccttaaaattaaataatgaaaagatagcttcatgaattgcggtaaaaatgtctttttgatctcttagtcatgctaataccgcattattaagaggaatgtctatacgttaccgctcaaagtcgcatcggaaaacaccacggatcgggcacccgacgcgcgccagaaaaatcgggggccgcgctcgcccgccgcccacgtgtcgcccccacgcgtccccaccacagcgcaccatgttgcaacagttaccgggatataacggaaacgctctattaaggaggatccatttcattttttttgttacaccaaaaatgtttcacctagtgtactcataatgtttcactatgtatggattaaatgttacagtaaattaaatattcttttgcaacaaatcacccacatattatggaaacactctattaagggaatccgttttattttttgttccacaaaaaatatttcacctagtgtattcataatgtttcactatgtatgaatcaaatattgcagtgaattgaaacattatttcgctatttgctgaaacatttgtttttatatagggtgaaacaatgctcaattttttggaaaccgttgtttcatacgttatagcaaaatgtttcatgatgtgatttagttgtgtttcaactttttaaaagactgaaatatttttgatctatttagcgaaacatgttcaatctacctagtgaaacaatgcccgattttttaaaaaaaaatcggacgcccgatttgtaggtgcctcgcattttatcaaagtcttaatgctttttaggttggaatgcccgacatctggttagactatctgatattggagtttccaagttttctaaccaactcagttctctatgttgatattcattgctagcaatcggaatgtccaacaaatcttggctttactttcaactctgaccggaaacgtttgaagttgaaatcggaatatccaaaattcaaaggaactcatcaatcgggtgatatttattacccacatcggatatttgattgtctcgagtgttcaatattctaggaaaatcagttcactagcaaaatccccgtgcattgtaatggatgaagtcaacctactttaggcttataaaacactaccttgttcaataatgtatcaataagcatcacaaaggttctagtgagagtgtaggtaataggtggtaacagagtaaaattcaatcatccttgccatttcaaaaactatgtgaaataatgcatgaatagaaatttggcagataattgccacatctggagattctccatttccatgttcagatgttgttccagtgctagctttctttcatgaatttggaacacttgaaaataaaggctatgcatgcttgatctcagacagtttactgatccaaaatagtctcgtactattactaattattttagctatagcaacctttggatgggatcatcactgtcgttgtcctgatttcatgctcctgctggagtgctaatgctaggggacgaaggttcgagaagcttcgggaggtcgtatgtagactttaattttggtaccaagtgggctttgttttgatttgattcgttcggcggcccatacaagtgggcttttcaagtaaggaattccgaaaggaataagttcacttcatgaccctcaactgtgatcgaaatctaatccatgaccctaaaccacaaaaccagatatcactggtagagaaaggctttttactaccggtttgtaaccatctgtagtcccggttttccaaccgggactacgaatccgggactaaagatcgctatctttagtcccggttcaaatacccgggactaaagatcgatttttagtgttaccaaccgggactaaagatgaagtcaaatccggtcggtagtttctcttttcttgtattgttttctactttgaatattgattttaccacatcccccagaatcacagaacaaaacatcatctccaaatctcaaatcaattaattacaaatccatcatctccaaatacaaacatcacaaatacatcacatattcacatcacacatagatcaaatacatcacaaattctcaaaaccaaattcatcacaagtccgaaaaaaaaaaacaaatcctccactgccgccgccgcctagccgccgcccggccgctgtcctccaccaggccgcatcccaaccgccattcggccgccgccgcgaccgcttctgccgcatgccaccgcctgcgccgccgcggccgcatccaccgtccgccgagcgcggccgcgcttgcgtcggggagggagccgcgcgccgcgcccgcaggggagggagaggagaggtgaaggggaggaagggggaagagaaggaggagatgagaagttgagaagggagaaggagattggagaagataagaagggagaggaggagagatgagaggataagactgtgcgcgcgagaggatcgaggaggcgcggcgtttgctctgcgatttttttttcgttttctttttttctcccggttgttataaggatccgggattaaaaatggatctttagtcccggttgataacaccaaccgggactaaagatctaaagatgatctttagtcccggttgaaatttaaactaggattattgtggattttaggcatccgaccaaagatggtttctctagtagtgtatctcgacccccgaactcctaaaaccggtgcaatttgactccctgcgcggttttgggaggcggttttgctgacgtggcgtctacgtgacaatattgaccaagtcttcgatccacgtggtgttgatgtggcacttacatggcattataattgtgagacccatttgtcattcacacacataaaaaaattgtggggcccactaacatgtggaccccacatgtcatcctccttccttcttcctcctccctctctcccttctctctctccccccttcttcccctacgtctcccacaggcggcgatgggcgatggcaccgggcgacggggaggccaaacagcggcggccacccggctagagtggcggcggcgctagaggcaggtcgagcggaggcgatggcgtcgggcgacggggcggcgcaaacgacggaggactccaggcgccgcgcaacaacctcgacctcgacgccaacctgctccgcggcgacatccagatcggcgtctagatcgagccggcctctggcgccctcgcgcgccccaggccgtccgcgccaccctccgaggccgacacgccgcgcacacccagcctcgccgcgcgcctcatgggcggaggccgctcggctcgagcggaggcgacggcgccgggcgacggggcagcccaaacggcggtggccgcctggctcgagcggcggtggcgccagaggaggatcgagcggaggcgacagcgatgggcaccagggaggcccgagcggaggcggcgacgacagcggcgggcgggccttcctccgtgccgtcctctccttgctagctgccggtgcccgaagctccgccttcatcgccccccggccgctcgctctcgctgtccccgtgtgccaccggccaaaggggaagaaggggagaaaaagagagagaagggagagagggaggaaggaggagtatggcagcggcggcggctgcacggctcgccgctcctggcctcgcctgtcctgtcgtcgtcgctccggccctcacttgcgcgccgccgccgctcgttctcgccgcccgccgcccactgaaggggaagaagggaagagaaagagagagaagggagagagggaggaggaagaagggctgacatgtggaccccacatgtcagtgggcccacatttctttcttgtgtgaatgactaatgggccccacacatatttttttttctaccgccacgtcaacgccatgtggaagaaagactcagtcaatattgctacgtaggtgccacgtggcgccacgtcagcaaatccgcctcccaaaaccgcccaggaagtcaaattgcaccggttttagaagtttgagggtcgagatatctggttttgtggtttagggtcatggattagatttcgatagtgaacttattccattccgaaattcgaacagaaatcggtcgactttacgtaaaaattatccgggctgccagctcacacactcgccaataatatcgccatcaaccgacctcttggattcatcgatcacacaagcactcgctccgacgactccggcgagcgagagatcgtcggcgatgggagaaggcggcggcggcggcctggacgtggtgatgttcccctggctggcgttcggccacatgatccccttcctccagctgtccaagcgcctcgcggcgaggggccacgccgtctccttcctctccacgccgcgaaacctcgccaggctcccgccggtgccggcgagcctttccgatcgtctccgcctccagccgctgccgatgccgacacggtggaggggctgcctgagggcgccgagtcgacggccgacgtgacgccggacaaggacgggctcgtcaagaaggcctgcgacggcctcgccgccccgttcgcggcgttcctcgccggccgtgcgaagcggccggactggatcgtcgtcgacttctgccaccactggctcccgcccatcgccgacgagcactgcgtgccatgcgccatgttccatatcatcccggccgccatgaacgccatgttcgggccgcgctgggcgaacgcccggtatccccgcacggcgccggaggacttcaccgtgccgcccaagtggatccccttcccttccaccatcgccttccgccgccgcgagttcgggtggatcgccggcgccttcaagcccaacgcgtccggcctgcccgacgtcgaacgcttctggcgaaccgaggagcggtgccgcctcatcatcaacagcagctgccacgagctcgagcccccccagctgttcgacttcctcaccggcctcttccggaagcccaccgtccccgcggggatcctgccgccgacgaccaacctcgtcaccgacgacgacgacgacgacgaccgctccgaggtcttgcaatggctcgacggccagcctcccaagtccgtcatctacgtcgcgctggggagcgaggcgccactgagcgccaacgacctccacgagctcgcgctcgggctggagctcgccggcgtgcggttcctgtgggcgatccggagcccgaccgccggcggcgtgttgcccgacgggttcgagcagcggacgcgggggcgcggcgtggtgtgggggcggtgggtggcgcaagtgcgggtgctggcgcacggcgcggtgggcgcgttcctgacgcactgcgggtggggctccaccatcgagggcgtcgcgctcgggcagccgctggtgatgctgccgttggtggtggaccagggcatcatcgcgcgggccatggcggagcggggcgtcggcgtggagatcgccagggacgagagcgacggctcgttcgaccgagacgccgtcgcggcggcggtgcggcgcgtcgcggtgggcggcgagagggaggcgttcgcgagcaacgccaaccgcatcaaggatgtcgttggagaccaggaacgggaggagcgctacatcgacgagcttgttggttacctcagacgctatagttgatcagcgaacaaaaaaaattgacgagaacttttatatacgtgtacatagtgattaaaaactaattttaaaaaataaattactacttccttgattccaaaatattgctatatacaggatatgaccaatccaaagaccagtctggatagatctctctttagattcgtttttctttatccatcctatatagtaatattttaggatggcggctgtaccaaactttgaaattaaatattttttttcagtaataaaaagatacgatgtgaggtgtatgttcattgtcttttaagttactgctcaatcactgaacgttcgattgtaaacttgtaaagctttgagaataagatgacattattctggcttaattagctagctttaccctgaaatttgttagctgcttccgggatgtgaatctttgggcttatccttgtactgtctagatggggcattgggtttatcaattatcattcatcgcgttggccctctgatggatgggatcaggcatgctgttccagatgcattttaaccttttaagctgcctgacctggccactaaaaacgctgccataaagctgccgtctccgcgctggctgagaactgaagatcaggcgatcagcttgatttggcattccccacaaaaaaaaaaaagatttaccggcgtgcacagtatcatcattccttgtcaccaactcaccatggccttctgttgtaagcacaaggagggaaaccttgatcgatgcatcatgcacctcgatcagtcctgtggcgttgattgctcaataatatcgaaacttttttttcacgaacgcacaaaaaaattatacgttaatatattagaagaaaaagaattttagttacatcaataatctcgaaattgatcgaacatttcctcaccaaaaaaaaaataacagattgatcgaagattggaatacagaggcaagcttgccagtctttctaattcatgaacagtataatttgcatatgcacaaacggtaattccaagatggcaggttaatttcccttcgtcctgcgtttcttttaccctctcgcatgcatgtgtgatatttcaaaatggtcattctacatcttccaacagtagttgatcgagtctattcaattgggacgtgataacactacgcactaacactgttggtatgcaataatgcaatatcactagataccctgacggtgctttcctgcgcactgttgatatgcaataatgatgatatagtatcaggcttgatgcttgccggctccagctttgcaaagttcatattctgtaataaacggttgtttaatttacttgggaaatagtattccatcccccacaatatgtgatggcctaatttcctccaattttctaaagactccgttgcatgcatgccgatttgtactttataatccaaaatgacaggtcacaactgaactgtagctagtcactgggggtcacagatcacagggtgtgccactacaaacggaaagaggcatcactgccattagcctagcatagcacgcatgcagtgtgccgtcgcctcaaccgcacattgtatgtttgtacaattgtactccgttctaaaacacatatagggtgtgtttagttcacgtcaaaattagaagtttagttgaaattgaaaagatgtgacagaaaagttagaagtttatgtgtgtagaaaagttttgatgtgatgaaaaagttagaactttgaagaaaaagtttggatctaaacaaggacatatactctctccaacttaaaaaacaactttttttatataaatctaaacgtatactagactatatccatattcacgtacaatataataagccaataaatttatacataaaagttatttttaggacgaaggagtacttcggtagctattttatagattaaagggataacaaactatattgttatttattagtggtctctattggtagggcagggagtgtgaaaatgagatgtatctcattactccaaatactccatgtactttagaagcaactatattttaagataaatttaaatggtagaaacaaccatattccacaagatgaagtaccacacgttacaatcgctaaacaattgcaatgggcgattctagatgattccttttagaaactagattattttccttttagaaactagatgatcctaggatgattcttggcgattctaggatgattttgtctacactaatgactttgaaaagatgcacacactgtacacattacaaaaataatgaatgggaaaaaaaatctgatgtttagtacgtagaaataaaacaatatttactttaagatgacttgagctaagatgaaaagaagtatgcaattaaagaattaaaacactagtaatatttagaacatgacttgctgatgctagttttactttttctttgttttttttctaaaatgaatggttatgataaaatttgttgataataagttatgcaaatatttcaatattttaagaccatcgttaaattttgttggtgccatcctaatcacatgtattttaccaatataaattcaagctgcaacaaaagtttgatacattcacgatgaatatcttaagagcaattttacggttcttgatgaggtaacaaaattttatataaaatttggtacctcataatatctaggtaccaagaaataccaaatttataatagaaaaagtgttaccttctcaaggaccgtaaaattgctcatattttaagctttgtggaccatggttgctatgaatggacacatgcgtagaaagctaacatattacagtaatgaatagaaataattgaagagctttaattcctaaattacacatgtagataaataatcatctctctcctaaacaatccaacagatatcatgagttacatgtgtatttaaaacgtaatccaatagttaaggttttaagagggtgttcccacctcctaattaaacagtgtgattttcacaaagaaggctttatgcctttatatatttttaaaactttacaacagttaattacgaaatggagtagttaatacaaaatcattcaatcattcaactattaaaagaacatgttatatattctcctttgacagatctgatgttgaagaggaggaggcctatattctccttgggattggggtccttcaacctctctccaccaaccccatgctgccctcctcaacctcttctcctactttccactagcttgttggttctataaataactgcccgtattctctcctctcccacaaataaaactctccatctcctccctatcccttgcaatcctactcgccctgagattgactttccatctgttcttcctcaatttcctttcgatagcggtgcagcgaaccatgtgtgcgatcgatcgatcgatgtgtattggatcgatctacacatgaaatagctatagccttggcatgtactacatcgatctggccctctttgtgatcttccacagctttcttgaactgcacgcatgatgaataatccctttggttaattgtgatctggtctctgagagatcgtagttagactcgatcggttgcattggcatcagagagagcagttcaataaagctgtgggaaattgcagagagagaccaaatctcgtcatcggtcattcggtatctgtaagtgacgccgccagcaaattcccaattaattctctcttatgcctcacgcacgatggatcgatggaggtatgctaattaggtatattttcccatggttatttatatatgtatttgtttattataatcgcgtgctgtatcatctctcggatcccccattttgtttgtttctccctaacattcaaatgcgccatgcatgcactgttgtgagatctcaactgtttacaaagtattcaaatactttccaacttcttcttgttgtatcacagctattgcttgataaaggaatgcgaattttaaatgacagaatatggtgatgtatatagaaaccaacacagtatttccccaattagtagtactccatatactccatatatgaccgacggttaatttgctattaatctgctgttccatatatgtaatgtttgttggtatattggtgtgacttcgtttttgttcaggcaggtttgaattaacgcgaaaactaaatttattgtctgcacatacgtatacaaattgcattacaaatatatatactagattacttaccctaaaaaaatactccctccgtcccaaaataaacgtagttttgcactattaacgttcaacgtttaaccgttagtcttatttgaaatttttttatgattagtatttttattgctattagatgataaaatatgaatagtactttatgtgtgattaaatatttttaatttttttacaatttttttaaataagacggacggtcaaaacgttgggcatggatatccacggctgcacttattttgggacggggtagtactgtggtagattactccactattctcagaacaaaaaagagcagtacgtagtacgattgacgtgttggcctgacgtctgccgtgaatgttgcttgaagggtgcaatcgatggatcaatccatcagtacttgtaggtcagtactcagtagtaggagaagaagatcttttgtttgaaaaaggggaaaacgatggtgcccctgcaaaggagtgtatacatgaaacctcaaatcacacccccagtacttgtgatgcgttagcgatgaatctaattacgacatgatgtgacttttattcctggagatttccccagtatgcaagcgtgctctcacttcacttcacttcactttggcaactctagggacgtgtttagtttcctccttttcctaactttttatcacatcatatcacatcaaaaacttttctactcacataaacttctaattttttttcaaactcttaattttttttcaaacttccaactttttttcaagaactaaacgcactataggcttatgtgtcctatacatcatcgggttcatagttagaatttgaattttttttaatggttagagtactcctttgactttttaatagatgtcattgctggtattgctattcttttttcataagtttaattatttgtcttattcaatataattgtgtaggagtacatatcatctattttgttgtcatttgttttaacattagagataatttatgtatatcttatatatatttatattatatttgtataattttttaatgagataatgattcagtttttgttcaaagtcatagggcatattcagctgcaattttttgtggctgtgctgcttgctgctgctgcagctagctgccatgcacctgccaataatggcagccgaacaacttagggggtgtttaggaattagggactaaatttagtctctctcacaaaattataagtctctatggtagtgacttatgtttttgtgagagactaaagtggagagctccactttagtccctccaacttaggtggtgtttggatctagggacttaactttaatccctgtatttagacactaatttagagtattaaatatagactacttacaaaactaattacataaatgaaagttaattcgcgagacaaattttttaagcctaattaatccataattagagaatgtttactgtagcatcacataggctaatcatggattaattaggctcaaaagattcgtctcgtgaattagtccaagattatggatgggttttattaatagtctacgtttaatatttataattagtgttcaaacatccgatgtgatagggacttaaaagttttagtcccatctatacagggcctaaaggctgggttatttcaggagagataggggagattgtcacttgttttccacgcgcacgctttcaaactactaaacggtgtgttttttgcaaaaattttctatagaaaagttgctttaaaaaatcacattaatccatttttgaagtataaaatagttaatattcaattaattatgtactaatgactcacctcattttacgtatcttcctaatcttctctatctcattctcatcaaacacagccttaatttgtgacggaagaagtacattttgaaacgagagagagtgcaaagctaggctagctaggtcaagctggtgatctgtgctgagctgcaggcactcaacgaacagttgccattgctttccattgcatacctgtgctgcagctatgctagcttagctactgatcagctttgtgtgtgatgttgggcaacacaacacaacactactgactgacatggcttcttacccctgaacagttctcctccttggcctatcttgttgtccatggatatgatcacacatatacacacacgatctgatggatggagaagagaggatgtgtctcacttctactgaggagtactccctccgtcctaaaaaaaagcaaaccctgaattttcgtgtccaattttgactgtccgtctcatatgaaatttttttataatttgtatttttatttttgttagatgataagacatgattaatattttatgggtgacttgtctttttttttcatattttttttaaataagacggacggtcaaacgttgggcatggaaaccagggtttgtcttttttttttttgacggagggagtaagtacgtgtggtctagtaggagatgcatcttgtcactctgaactctgaagtactccgtataggagtaggagcaaagtaggaggaggagtagtactctactacagcaacagatcaggtgattcatccaaacgagagagagtcaggaatgtgtcatgtttcccttttgcgtccgattgaactatagcgtcgtctccacttagaaaaaaaaagaagatgaatcatggcaataatctgaaaaaaggttttgaacagtgcatggcaataatatgaaaaaaagggggttgaatagtgcagttcaggaacccaattcgcaagcttttagacaaagtaattgtatgtgctttctggggtgaaatgaggggaagggtaaactttttcacgtgctgataaattaacagtgttaacatgcatatagtagtcataatctcataatctgaccacaccgatcatacttgtaaaatcacgctgttgtttttcttttatcttgcaaaatcgatcacgttgttatttgcaaccgtacgtgaatcatagcattgaattctctgatctgaatttcatcggccggctgcgagcctgtgagaacacgcctttgttcttgttcttgatgacttgatcgatgcatatatgtcaaagaaaccatgagggcagtcccaacctatagtatccataagtagtgtctatgaagccatcttaataagacatcacgatagaaactacactctacaacccatggtttcttaaagtgggccattaataaatacatcatctctcttctctaccaatcatatttattcttcatctattatgaagacattattctctcccaatacaaaacttgatagtgtctagtgtataggttctcgtgttgaagctgtgtcttgcatgagacccagtttcttcctctcttcactctctcacttaattaatatagtgccacataagctaaaagttttacatggcaatgtagttaatgctatagacaccattctagatggagggttgggacatgctacattgcttccatgtacgcaacacatcccatctatgcaggccaaagaatcctagctggggcttggggttgcacggatgattcaagaacagggatacatgcactgttgcttcatgtgtttactctctgtcagacatacgatctggtcggttgcctaatgttggagttcatttgactataaaccggcaggaattcaacttccttttttcattgcacctgtgtttgtacatatatatctgcattttaatttacatggggttcatacttcagtagaagggtctcagtgaccggtcaaaagtgaaatgaagtggtgtgttggagttactgttcatttattcctactttagcttaatcacatcaggctgagtttagatccaaagttttctttaaacttctaacttttttatgacatccaaactttttcacacacataaactttcaactttttcgtcacatcgttttaatttcaactaaacttttaattttagcatgaaaaacacaccctcaggtattttgtctgagagagccagccacgcacgcatgcatattgttctttctgtccccatgctgggggttgcagtgcagtgcaggcaggcaggttcccagggagaattttcactgggattccttcctgaagcagccatccaacatcatcatccttgtgcttttgctccctttgcctttgccttccttgcagtggaattcatccaaattctttcttctccttctactcggatctccctacgagtgacatgagcgagacgacgacagacagggcgagtgagatcgatctagattccggagatgagcagagcagcctacctgtcacggcacgagccactgacactacatgtgggcctggaccagcggtggggcccacgtttcagtgaccccccccgttggcgccatgtgccgtccctgctcttttgttttgttgcgatggatgcatggtgagtgagcttccttctctgaagcgggctgggctgagctgagctgaggtgaggaaagagaggtggagtgagcaggagggaaagctgccttctgtcactgcctcactgcctgtgggactctctaaagcaaaagcctatacttctccagcttgacaggatatggaactacccaatcccctgcctcagcctttcagagagtgggcccattaaacttcccccttaattttgctacagtatagtcttttttttttctgaatatgccattatatttattttttagggaaacgacgcagaagggctgcaggaatatattagaagaagaaaaagttgtttacaaaaacagagcacaaaagcaaagcgaaaaaaaccaaaaattacaaaaagagggacggcctcactgagattggaaagctgaatgtctcaggtcaagatcttgcagaatcaaggaagccaccctatcagccgatgacaaagttttttggaatatacgcttattccgctccaaccagatgttctaccaggaagtgatcaaacaacccataattcttttttgatggggttttggttgaatggctgaaagagagcaccaccagcttttcaaatccaagttgttaggcaaagagttgtgatctaaccccttccaaatacagattttgttccacacttcagagatgaaagaacattccttgaacatgtgagaagtgccttcaaatgcctccctacaaagaggatagatccaatcgctccagtgtcactgaagaaggttttgcgcagttagagtttttttatgcagaacaagccaacccagaaaacgttactttggctcagcaggagctgaccaaatcttttcaaaattagtggtggggaagatgcactgaaattgtagaaaataagcgcttttcgagctataaactccattatatttgtggatacaaagttgaaaggttgtgtttaagaaattataagaattttgtatatagaatgttttttttccataaatcacacagtttaggagtttaggaagcgtgcccgtgataacctatttctcacatttcaaaataaacaaatctaatgcaagatataacacatcataatactacgaatctgaagataagtactgggatatgtcacgtcccatactagctggagtagtttcatttattttgggacgaagagagagagagagagtagtactaggtagtactagtaatctataagagggaaaggacggactagtatgtatgaaaagtatggaatttcttaaaaaaagtatggaattatatgtattatcagtttatcacatttgccactatttttcatccacttaaaatttattgaacattttatgctgctttgtattttggaaaaaaaaagagaatattcttggaacattttcccaactctccaaggctgctaatctttgtcttgcccaaatacattgcatccataaacgtgaaatgaaaattcaattttgtttttaacaaaaaaaaaactttcttagtactacttatttgtgagcctgtatcactcattgtagtattattgatttctattatatgatatactatcactcattgtgaggctgataatacgtggggccatgccaacatgttacagacgtacgatacaataccgtatcaatatatatatatatatatatatatatatatccaaaactagcatggactaatttaaaaatgtgaaaaatctgaatgcacttaacattgattatttcaaaaaagaaaaacatagacacattccgtgatgataaattcatcaagatcggctatatactgctcccattgagtattcaaactcaacaccacaatcttgctgcatttcttgtcatgcatgcgaggagccctacatggtactgtagtactaagcaaagcaaaatggaaaaggttgaattcctttttagccttgatgcatgatatgcatggtaagagaaaaaagtgaagacgcctttacggaagagacatcaatttcatgagctacaatgatcgagctacacagtgatggtcctctattgatgccgaaatgcatgcagactgttgtttgaaaaaacaaacgacaaataattggagctgacagtggcagatataaaatttaagtatgcagtggctagctggactagcaaaaagaaactagcaggcacttaaattaagtaagcaaaacctcccagcgaaaaaaaaacgtaagcaaaaagggcaccaaattaagtagagaaaacttgatctaattatgaaaagctaacttacatgaaatggaaaattagcatcacatctctctctctctctctctctctctctctctctctctctctctgcctgtctcatggcattgctaactgaattcaaagtccttgtaatgccatttcttcccacagctttcttgaccctcttcttgcactcctctccctataagcttccactgatgatgcatatctctccagtaatgaaagtgagtgaggcacaagagaagttcaagaaagctgtggaaaggcatggcatggacttgaagagatcgatcgagatctgcaggctctatctacacatccaatgcacattgcaacacctctccatgccatctgcctctctcttgatcctagctatctctctttatataaccaagaaccagctgctagctcagctaggccatgcttcagctccacagccgtagaaagagagaggacgaagagctttatggctgcaagctgtggtagacgtacagtagacttatagcagtatgcatgtatatatgaagagaaggatgagatctaaatgaggttgcagcaacaaggggcattggatgggttaaaaaggacatgcatatggtgtgagtgcagaggttataaccttctcatgcatgcaatgcaatgcaatgcacagcttgattgctatagctcttccttggaccacctttgtctgttccattctagaaggggcttagctgcttgaattgtgtgttttttcctctgtcttgaatgctttgaatttaccactagctagtagtagtaccagtgcacgcagagaggctgtgaaattaacagaagtcttcactacccccctcttcatccagtgggccataatttagctatagcttgctactactcctaggctcctagctagcagctagcagcaattcagcatgggccaaagctgaaggggtagatgagaaatgcaggttaatagggtgattagtacagcagtagaatctgaaagatatattgtgcatcattaatttacttactgcaaatgcagtgcagggttatacaactagctagctgcaagctagctacgtccacaaggtactgggcgtgattacgtacgtagttaagtactcctttgtctttgagctgttgtcagggctcgatcgatcaggagtggccggcctataagattggccgatctgaaatctgaataaatctctgaatattaaggtgattggctagcacggttaagtctgtccaggctgtagctgtagatcgatcacagctagcgagcacagatattccaatatatactccacgtacgtacgcaacggccaagatctacagagagagatctccggacggatatgatgggcatgcattcgatcagatctgaccatgcatatgcagtgtagtccttgttacctgccatatcgagcactgctgctgattgcatgctgctatgctgagctagcatgcgatcgattatccaggccggccagtgtatgtgtgggcattcgcgatgttgcaaattaaccacggcatcctttgcagcaaagcacatgccccggcagaagaatcatgcatcactgagacacagaatgatgttaactttggagcaaattaaccaaagtgccggaattaattagaggagctcatgagccatcagatcaaggtctgacgaactgacgaacaaagacgacatatagtagtacgtatagctgaatatatgtatgtgtatgtggtagaaaattacagaagggctagctagcagaatcatgaattaagcggcatgcgtgcagatgcatgcagcatcgattttgtctagagtgtaaaaagaaagtatcagtgcatgcaggctgtacactaattaagcaaagcattggtgttgctactatattgcagactagctagttctccatcaggtcgacagacagacagacagacagacagaccgacccggtcacgcgcggccacgaagacttgaagagcatagtgtaccaatgtaccatccaatgatgcagtagtggcacagtgagaatcaaatgcaacgagatcgatcagcagcaggagtgtatgtatacgacgtactgtttgctcttcaatagaaagcagcctaactaggtagctagctcagcatagcagtgtccgattcgattctctttgcagggtttgaattcagagatcgatcgatggatcaagcttgtttttcaaattccctgtagctacgctacgcacatcgatcgatcgccggcaggagttaggcgcgtgtacatgagccctgccgtttgcagttttgaccaatattgcgaccgatccatccatccatcgcgcgcgccatgaatgcgtgcgatcgatcgatcgatcggtgcagcgaaagccgtgttccgctcgtcgcgtcctcgcgagcgatcgagcgcgtggtggcgtgcgcgcgcgcgtggacttttgctgcgtcgaggcgagcggtgaacagtacgcgcgccgcgcccgcgcggccggaggaggtgaggtgatcgacgagctcgcgagctcgccgtgcgcgtgcggcacgcgcgcgcgcactcgtccacgtgacgggcggtcagggcgtggagccagacaacgcatgcgcgcaccacagatcggatcggctgggctgcgggcacccgcgcgcgcgtagggggtgaaattcccgatcgaccgagctccctttctgtaaagggtaccgtttccgaacgtactgtttttatctatttatacgagtttgtttctttaaaaaaaatcttctattgtattaacatcaacgacgactagtttaaatgataaatatagtcagttaccgaccgatcaagcgttattttcgaagagatgctactgattccgaccgtgttctagtccgcatgcatgcatgctgtgtctcgacgacactatactatgcacacaagaagtagtaacacaacaggacgacactatactgtggattcgcagccgatgagcggcgggtgaaaacccaatccagccttgaccggaccgacaacgatggttcattccccctcctaaggacgttgtccaggggcggatctatagttataggaccggtgtcagacgacaccgacgactttcggcaaaacctatagcgaaactgcttattcatatgctataacaccatgatctaagtataattagcgcgttctgacaccaacgaatcgattttctagatccgccactggcgttgtcgtgctgtctcacccctcaagggtgattgccgggcgaaagctcggtcttggctcctttgagtcccaacggacgacggcagcggtttttccgtcgcttttcttcttgaagatatcgttttggcatcccctagtgtaacatcccggccaagggcttaataggattaatagaatactcatatcaacacgttgcaacttcttttccggaagccaatctccaaagaactccagggttaagcgtgcttggcttggagcaatttagggatgggcgaccgatcgggaaattcttcccgggtgcgcacgagtgaggacgggtgcgcacgagtgaggacaaattgtgcagaaaagacttgtgttggtctgtgagggcatgtaagggggctcggcctaggagaggtgggacgttacacctagggggcaatctcgtctgtgtccctttgttggtctattgacggtcggtcacgcttagcggcggcccttttttctttttcctggttacgatcctccagggttgtaatcttgtattttttttcctactctatcaatagaacttcgcaccgtctcgtgcgagtcgttaaaaaaaaacaggacgacgcgacgcgacgcctcacgcctggcgtcacctgtttcggagatacacaaccacactgttcatgaaagcaatcatacgtttgggctacaactgataaaccgtgaaaaaagaaaaaaaacaaagcaatttaagaaagtgaccttttttttcatgatctgtattattaatggtttaaaggggctaatgttagagaaatcgactacgatgaaaaattcgcaaaattggcttcaagttttgaaatttaaatttttgttgtggatgatgagataagcagacgataaaaggcttcgacttgatttatgtttgtgaattagaaaaactgataagtttgcctctgtatttcaatcttcgataaattcctcttatctttttctgttcgtgaggaaatgttcgatcaatttatacagatcgaggtgcatgatgcatcaatcaaggtatactccttttgcttacaagatcagaaggccatggtgacaaggaatgacgagagacgactgtgcatgccggtaaatctctcaagtagtgggcaatgccaatctagctttctaaagctgatcgcgcctgatcagtgatcatgcatgcatgcatgctaacgcgaccttcagttcagagccagcacggagacaccagctttatggcagcgtttttggtggccaggtcagggcagcttaaaaggttaaaatgcatctcgaacagcatgcctgatcggcattcggcccatccatcagagggccaacgcgatgaatgataaaagacagtaaatttcaccgaagtacagatactttgcctaatctatcacaaaactacagatttaaagactcctctcacaaaactacagatttagtgcatttgttatcgcaaaactacagattttagcattcaccgttaaatccactgttgcctgacatgtgggacccatctacagtctcaggaaccttcagtatgctccatcttttgctgccacgttggacacttgcgtggcagaacgattgtacgatgcggcgttgcgatgtggtgcggaaaagaacaaaccacctaatgagtccacgaggaacacaacccgcgactcctttgttctttccaccacgcaagcatcaaacgtggcagcaaaagatagagcatcttgaaggttcttgagactgcagatgggtcccacatgtcaggcgacggtggatttaatagtgaatgttaaaatctgtagttttgcgataacggatgcactaaatctgtagttttgtgagatgggtccttaaatctatagtttcgagatagattgaacaaattacctgcagttttgtgaaatttactctaaaagataagtaaaactcaatgtcccatctagacagtacaaggataagcccaagattcacatcccggaagcagctactaaaaatttcaggtttagttctcaatattttctttaaacttttaacttttccatcacatcaaaactttcctacacacaaacttccaacttttccatcacatcatttcaatttcaattaaacttctaattcaggcgtgaactaaacacaccctaaagctaattaagccagaataatgtcatcttattctcaaagctttacaagtttacgacgaacgttcagtgattgagcagtaacttaaaagctaataacatacacctcatatcgtatgttttcagtttataagttactgcaaaaataataatttcaaaattttgtacaaccaccatctaaaatgttgctacgtaagatgaatctaacacgatgaaattgggcaaagatctgtacagactcgttgtccaataataggtcacattccgtcttagatagcaacattttagaacctagaaagtagtaatttatttttttaaaattgctagtttttaaatcgttaagtatattaaactatacgttttcgttataattattttttgtttgctgatcaggtgtagcgtatgagataaccaacaagctcgtcgatgtactgctcctcccgttcctggtctccaacgacatccttgctgttgctagcgttgcccgcgaacgcctccctctcgccgcccacagggactgctaatgcgcgcgatcacccgcacccgctcccctataagtacgtccctctcctccccttctcttccctactacagtaagccacaatatttttttaaaaaaataaaagttagaaaaatttatgtaaagaaatactatatataaaaaatttgaattcaaatttaaatttgaatcgggtatgtaaacttttgacttacaaactttgggtatataaactttaggtgtataaactttagatgtatagaaatactatatatgaaaaatatttgaattcaaattcaaatttgaatcggatatttgaatttaaattcaaatttgaatcgggtatgtaaacttttgacttataaactttgggtgtataaacattagatgtatagaaatactatatatagaaaatatttgaattcaaatttaaatttgaatcagatataattcaaattcaaatttgaaacggatatataaactttttgacttataatcttttggtctataaactttagatatatagaaataatatatatataaaaaaatatttgaatttaaattcaaatttgaatcggatatataaattttttgacttataaacttttggtctctaaactttagatgtgtaaacttgaggtatataaactttaggtgtataaatttactaaaataggaaagtaatgcggtaccaaaaaagaaaaccaggtggagggaggtgatcgccaccccatccccagggcgatcgatcgcccaacaggatttccgccatgacgcgccgcaccgccgtggcgccgccggattttttcacgtcgtgtttcataatggcccgatttttgttcgaatatcggaatttcattaaccatgcagttcgttgcgcgtcatcgcgacagtgcgtgcacgcagggtaagctactggcaggacatgaaagaatgcgtaggctccgacttgaacaaagctactggcaacaacagcctcgcctgatcaagacgaattagtattcagatttcgctgatgcttaccttgagatcataggatggcggacgcccccgtccgttcgattgccactaaattccatagattatagttagatgtatatactcaagattttcctccagaatttctagaacagaaagaaaacattaataagcaaatatcagcaagccaaggaaactaccacatcccttgtcctgtaaccaatcgcaggaaccatagtgacagactgataacaaacctgtggcttattcttctgtacttaaagcatgattgatgatgatccatacagcaaccgggtggatactggatactaacaaatccacatatgctttcataggtttaatgccgctagccgtctggtctaaagtctaaacagaatgctcttgcgcttgcataagaactttactagaaaaaaatatagacagcacactggcaatcaaatgatctatcttggatattataaaaacaaagctatcacgcacatcatggcctgatcaagacgaacaaaacactatcaaaagcttttaacactccatccaaattataaaaaagttaacatcacatatcacaccgatgcatagcactatttgagaattcaaaaaatccagtctctttaaactagcacagaattccatccagacattattatagtatcaaacagttgagattttgagaacagtaaaaaatattgattagcaaactcacttccaatagcaatcacagcaaccataatgtactggtttcagcactaaaccccgcagacttgcagaagaaagaaactatagataacaatctatacacctctctactactgttaacaaggataaacatgccaatgctgctgtttcatggcatactatgttgatccatcaagtagatacagtcatactaacgaactcacacagatgcttcttaggctttaaccaagagtccaagactaacatgctgttcttgacaccacacttcgatagacaaaaatctactttactaacaaaagaaaaatgatctgtctaggatataaacagacacaaaaacatactcatgagcagcactgcaaaattactagacaatcgatcatgaaccactagaagtgaagctaaatcctaattatagtctccaaaaattcagttggattacaccattatgcatttgtgatttccacgcagcagttacatatatatgctaggactatacatgctctagtaagaaacacattatctgaaaaaagttaagcataaagatgagcatataatgaaattacggtcattgaacaactgcatataacaccataagctgataagcatcacaacaatcaatctatatcagacaaaccacatcgtgtaacaagtaaaagatgaacacttgacgataagatcttaacaccatccatagagatatcataggtattacagtgacatcagttcaataccaaaaattgcatacttgaacaaaaaactactagggaacaaacaaaaaaagggatccatgagtattaattaatgagacgggggcaaaggagcgatctctagatctacttctcggaggagtttggcccgcgcttcttgccgaagccgacgacggcggtgacgaaacggcggttgtactgcatccgcttgtgggcgcggccccggggcttcttcttcttgtcctgcttcgccaccttcggcgtctgccccctcaccttcccggcgcgagccagcgagccgtgaaccttacctgcgatcgaggcgggcaaagcacatcaatcacccaccaaatcgcacggcctagagagctacagaagcaaggaatcacgagggaaagagaggactcggaggagatggttacccatggcggcggcggcggcggcggcgctcggacgatttgggacgacgaggcggcagcggcggctggtgtgatgagacgaagccctagatgcgtgggagaatttataggagatccgttgctgggccgggatattgttttgggcctttgggattctcggcccatttcacgtgtctcgctacaccggaggcccatgaagagcccagtagaaaggcgtagtgtagtgggaaccctcggggagtcgcggcgcgagcacaccactgacctctgcggcggcggcgaggagaggagaggggagaagccgaggaggaggcagcggggagagaggatgccgcggccggaggtgcaggcgccgccggagatattctacaacgagtcggaggcccgcaagtacaccacctcctctcgcatcatcgaaatccaggtgagcttcttgccagttcgcggtgctgggtgtggaggaattcttggtctcatgtttagttatgttgcagtcgaggattaccgagagggcgctcgagttgcttgcgctacccaacgatggcgtccccaagttgcttctcgacatcggtaatgcttttactctcttcctgctcaaacgatgtgttgatttgattaaaaaaagttgtttttggtacaattactttgcttagtttgtactatgttttgaattgcagggtgcggttctggacttagtggcgagacattgacagagcagggccatcactggattggttatgatatttcgaagtccatgcttggtgagcacctcgctttgttacttgctcttaaggaaatcttggcttattgcttgttggattttttttttggctgagtgctttaaatttctttctgtagatgttgctctggagcgtgaagcggagggtgatctccttcttgcagatatgggccaggtataatatgcatcttattaatgtatggttcaagaaatttcaatctcatatgttatgtttatgctgtggtgtatgccaatactcttaaccgtaagggaaatgcttgtcttgtttatttctagtatcacacttgctctacttaataaatcataagtggcagggacatactcccttaataacactaatatttttcattacttttgctattgaccgtgaatccatgattgttctcaaaataatttctactctgaaagtaactatgagtctaggaattcaaacctttctggagagaacaagagagaattaacccaaacagttggcttctccgatagtactatgatttctgaatggctatattttttttctctgcacatggcctggcgaataatattttctgcacaatctcaccatcctttggttaacacaaatacagcaacttcttcacagttgcttcaccacaacttgtctagctttaaggtgctgcatgtgtatttatttatattcaatcctgttccagggtttaggcttgcggcctggagttattgatggagcaatcagtatttcagcagttcaggtaatgtttgagctgttatgttactgcaacaaactgaccatgttgatctcaaatctgcacttttaatttgtcctctcaactgtgtgttttgtttgtgcagtggttatgcaatgctgacaagtcttgtcacaacccaagattgcggttaaagtgtgtatttattgtttctcttagcctcttaggttgcttgcaaccagttcataactttcatatgtgcataattttcagggctttctttggatcattatatagatgcctagcaaggggagcaagagccgttttgcaattttatgctgataatgtgaagcagagtgaaatgatcgtgactgctgccatgcgtgctggatttgcaggtggagtggttgttgactggcctcacaggttagtattttattacctcacaacaatgccatattagcgtacgaacaatgctacgaatttcgttactgatatacaattatgggcatgccttctttcttacagttcaaaagcaaagaaatcctaccttgtcctcacttgtggaccaccttctctaaattcatcgcttccgaagggtaaaggtcaagatggtgccatgtgtagtgatgatgatgagagcgatgatggaagtggtgatgaagatggagcccaaacagtaagcccatgctttacaagcttgttcatgcattgcattgtgctatgtttcatgtttcaagggaactacttactgcttcaacggatggcagtatattgcattctttgtccagagcttccccttgatattgttatattgtcgcctttacatcacataagttgtgataccgttgctttttgtgtgtgtgtgtgtgtgtgtacaaaatctttctaccaatctctgcttgcaagttgcattgttcctgtggtgttttactaacttattattcagttttaccttagatgttcagtagttatagaaatgctgttgtcttggaggaggtactagctaaatggttgtgcttagtcaaggactcaaggatcatctatttcatacttggttcttactctattttataggacctaatattggggtttttttccctcccttttgatgttcgaccggcttagatgaatgcttatatttttggtatgcaggtcggcatatatgaaagaaataggccaaagaagaggcagaagacgaagaagaacggcaagggcaaggcttggctcttgaacaaaaaggagcagctgagaaggcgaggacgggaggtgcccgcggacaccaaatacacagggcggaagcggaaaagctacttctagtttcaaatgattcttggaatgcctgtgcaccattttgccgtttgtcatactagtagctcattattagtagtacgagaaaggttcagttgaagagttgggtgaatgcgctctctctctctacaccatagagccgttcatgttctgtaaccttctagcaattctgagttttgacaaatgctgtgcaaatctatgtcctacttttgaaggatccagtattgtatgtttgttgcttaaaattttacatgggttttggcaaaaaaaaaatgcacggtttgatttgacgaaatggtgtacaaattccagcacatctcgttggtagtggtaaggactagagacgcatatgcgttcgctcggttctggataacgtgcacagaacgcgagctctcggtggttggttgagctgcgcgggagagcggcggtcgatggcgattgcctgcgcgctctcggtggccgccccgtccctaaccggcaagaccaactcaaacccgccgccacgccgcagcttccagcagcagtggcgcgagcgccgccgccgtggcgtggccgctcgcttctccggtaaatccgccgacgtcgacgcggaggcggactcggggcgaatcgaggtcagcgatactgatacatagatagactgctcgcacacgctctccaccattcctcaccttttctcagttatagatagatagatagatagatagatagatagatagatagatagatagatagatagatagcccattgggacaaatatttcttcatttctcagtttggcctccaggaggcatctaatccaccgcgaacaattgccatagccgttcacagcttcacccgtgtgttgttttgcaaaaagaacacaaagggattttttttttcaaatggctatattttacttacagactaatctgcgagtcttttatgttttccaccaaaaaatctcttcatagttctcctacgctgaatcaaaccattcgtcttttgggtgtgttgcatcataggatgactcgagctacctttggaaattgggccttggatcggttggcggcgcagcggctatcaagtacgggagcatcctgttacctgacatcacaaggccgaacatcgtggtagccttgttaatggtgtccattcctgtggctgttgctgtcctcctcttgctcaaagtcagctcgagagatgactgactagcttacaactttccagatgatgatgaattttcttgtatgatggaatttgaagcctcggcggctgggccttgagtactcttgtatggaattaatcgaaactagttcttctcagaatcataggctgccctcgaatttcaaactttgtttacagattatgcttgaactaaattcaagtgtgatactacatgtcacggttttttctctctagttcttgggtggtacatgtaacatggtacatccaggttcctctgttttgagtgctcttgttatggatcaagctggtgatcaagtctcaacacaaccttctgaatatgggtgctcttgttctggatttaaatatctctagttcagaacgacacacctcacggttgcttacccacagagtacatacctgagatttcaagatgctctactgcatgaaatatatatttacagtgcattatctttactgaattcagtatcagcagcaagtgacgtaaaaccatcacatgctctagggaatgataactgcaactacataaaaaatcatgccactttacaagcataccaaaataagaacgttgccgatggaattaattaacagattcagcctcttcgttgccacttcacagcctgagaactttgagcctctccaaaacaaatgcaacagctcgtgggatccaatgaattgaagaatagcagattggactacaccataacagcgattaatataaatgcattccgcggtaactatttacaggctaaaggttgtcttttagccacttggcagcaccattagcaatggatctgaaagaattcagtaagcaacatgatcaacaaaagaatgcagaattgcataggatagagaaacaaagaaatccacaatttgtattttcaaacttcaatagaagcaagtatgtatattgagaccgtcagttagcatttttccttctattcatttttggaacaagggttgcactaatcaatattagaagtaaaaatgaatgcaaccaacagagttagacaggctacaacctgctgtaaaggaggtcctgtaacaacagttttacctcattatggatcattactgaaagagcatattttcaaaaacttcagctgccccaaacagcaaaagaggaaaagtattaactatatgttcagtgtaacaaaaacattttgctgatgtggattcactatctcagtaacttatctttagaaaaacatgtagaagatcaatgaaaatgtataaaggttggttataacactaacttttttaagtgtaatatacagctctctttctttctcactataacctatacttccttgcattttttttacaaatgatcaagttcccaaaatttgcaatatgatgcatgaatgtatgaggtaaaccctcccagaactcaattgcattgtaataagaaacagctaatatttaccctgcaaaatcttgaagtttcttcaaccagtcaccctccccttcatcaggttgatccgaattttcttgggcaacagtagtttcattctcttggcgtatggctgcaatgcaaatgcaaatcgttagtaccttccaaggctagttcctaaaaataaaaaattcatcaaacttcgatagtaacgttagaatatgagaatgaattctttgctggagagggagggagggaagaggggagggtgggggatatagctaagcttgcttacattttggcttcacaggtgcaccagcaaaaccaccattgctcaaagaagccagttcctcaagtagctccttttctcgtccgctggaaggaacacaaattcacagagatatgggctcagtgattatgtagatttagaccaacagtatgtattcgaaagtaggttcaagtcaggaagcatataaccttatacgtttgggtatagtgaccttaatagtgaatagatgatcaccacgaacagatggtttattcaatgatggaacaccttgctttgctagaaccactacatcaccaggttgggtacctggaggtattctaagttcactatttccatcaacagttctgacctgcttggaagaagaatatgagcataagacagaaatgccagtagactatagaccacaagaatcattacaaggacatgctttctctcaaatctaaaataaatatgtacaaataattaactttgatctgaactgccatggttgttagaaaaggttcaaaactcaaatcagtctcagataaacaaatttgatcagacctaggataacatagctgcagcattggttaattagtctgagctaaaatgattaacaataagctgatataaatttaatcccaatgaaatgctggcctcaattagaagtcaggcacattacatcctatggttttggattaggtcaaatcaacaaaatgatctgattatcgtgtaatcaaatttatcttaacaaaaaaggtaacagcagattaagatcaagttggtgtacctctaggaatatgacttaaaatactgcctgtttggtttgctaatcattgtgcataaaggtaggtgttttcttatcacaagaaaacagagtatataaaaaacgctcaggcagaccaatagagtcaatcaacaatatataccaaacatcctatacacaaccaatgtggtcagaactcagaacacaaaactcagtttttgcatgttagtattctccgttactaaaaagtgagatggttcaggcattcatttcctattagttgtactctcattaatgaagaatggcaatgggcttcaacccaaactaaatatcacaattttgaatcataacaagaaaaattttacctttttaacagtgcccagaatagcttcaatgtagcttactgaaacagttgaatacaagttgataccatcccttttaatatctgctggctcctctatatcaaggcaaacaaaaagatctccaggaggtcctctgctttccaaatgcaaaaagggtttaggcattttttttaatagcatttacacatggattatttgtgcatgcacacaaaaagtatatagaaggcagacagaggagggtggtgtagtaaaataagacaataaagaggatgaaggcaaaagcaagagcgcatgtgcatgcagaagctaaagcaccagaaaatactatgaggatgccaatgatctatttatttgcctctaggaccaatatccacaaaccacaattttcactggtgagtgccttaacatattcaagtatgaagtatagacaagataaataacaaacgaatcactcacccttttggtcccgcatcaccttcaccacgtacacgaagagtactacctttgctaacacctggaggaatttttactttgatctcctttctaacacgaacacgcccctctccagcacatttcttgcaatactctgaaatgacttcaccctctcctgcacaggtggggcaaattgaaacctacaaaacaagaaatattagaagttaatcacatatgtaataagtatcaaatgaactaaaacgtttgcatagataattagatacacaggccaccctaatgctataaatatttatatttcggttacgtatcgagtcttcaacaatcttgtaaaaagcaaagcctgtatattctactgtgcttgaatacgtatttcggttacctatatcttttcaatgatagaaaaattagtaaatattttcttcttcagttgttttgatctgttttaatttatccattataaattaataataataaagaatcagtagtgagaaaacaaccaagttaatacagctaatattcttactaagcaatgatgaagctaggaatagatttaaccccttttcccttctcattgatctatatgtttgccacttatgtatattttacaccattatatttgtctaacaaaaaactgttcacatcctagtatatcttgaaaatatattttgtagttccatgagatcttgtttatagtattgattctgatcttctactgttctgtttaatgttcattttcacatatggcacctgacaaaagctgtcacattatcgccagatgttttcatggtaaagcactggaataatattatgaatgctattacctgggagaacagaccaaatggtgtctgctcagttctcattacttgccctcgaccaccacatgtggagcatattctcattttcgacccaatctttgatccagaaccagcacatgcatcgcatgtctccaaatgagataatataatatccttttctgttccaaatattgcctctgagaaccccagattcacatcatatctgatggtataagttcatgtcagtctataaagtacactagtttttatcacaaaatgataagagaattttagcaagaacaattttgtataagaatctgctggtctggtatccctggtttgtttgcagaaaaaaaaaaagatcacaagaaaaaaaaaataccaatatcagaaatgtttgaacttaggtattagtagcttttgcgaaaaggcaaaacacaaacaggaaccaaaaaagaaacatttggcacagagaatgaatcaacattgttgcccaaacatgctatttctgtaagctgtattttgaccaagcatgggcataaggggagttataagaccaagataatggtagtggcaaacaaccatgatatcctagtgccatgtctttggaacaatgtgggaatagctaatgtgggtgttaagaagggaatagctagtgtgggtgctcactcgtaaatactggcaacagagggaagataaacgatgggaaaggtagaaaatagcattaaagttgtatgaataccttatctagattgagatgtatgcaaataatgctagatctccgaggcatacataccaaattggttttaaagtttgtaacaactacaataattagtgctgctattcatatgctatttaaacagctttagctgatcatttcaactagataaacacattgaccatgaatatctggcaacagaacctgatgtcttccccctgaacagcagtgctcctcctgcgtgtcctaaatgttccctggtccataccagaaaagccacccatgcttgctccaaagaatgtctcaaatagatcaaaaggattactctgcatatagaaaataacaggtaaagaactgaagccatctgtgagcgaaaagggtaaacaatactagtcaataagcaaaatctagtatccttattagccaaagaattttagctagtacacatataattatataatcacactcaatatattgccttgtacggcctctatcccacaatataagggattatgccatttttttcacaaaaaataaggaagtagcaaaagggcaaatacatccgtcaaatccataaaaaagtgatacgaaagttagtagttaaggaataaactagtacaaaagttgacaggtggggaataaactagtacaaaaggtgctaggtggagaataactagtacaaaagctattgtgctacatttaatatcttttatattttgggacaaatgaaaagggcattatcccttatattttgggatggagggagtaagtgctgatagaaaaaattaagttgaaaagcaaagctgtcatactgtgtaagctccagctgagcctccaaccgcactcctaaccccagcttcaccatattgatcatacagcgccctcttcttttcatctgatagcacctgatgacaatgaaattaagcacttataaagagggaaatgaaacacaaaacagagaaaccagaagcagtgacgttgtaaactattacagcaaaaaaaaaaatccacatgtcaatagtaaaagtctataacttatcagcaatattaaatacaagtaaaaaagcagacaaatacatgaattaacaaattatgctgaattggatacctcatatgctgcacttatctctttgaacttatcggttgctccaggttccttattgacatcaggatggtactaaaaacaaaagcgaagatgttatcaataactcttatctattaaaatagaagtgtgcatgttgtgtgaatcttagcagcttgatgttaagagtaaaaacatgccacttggtaaagtatataaatcccatagtaaattagtagccatgaaaatcagctcagtaaaacctcgaggacttggtctgaagggtatttgaagcattagctaagctccaaataagaccctctcgtaggttcaaaagcctgctttttgtatgtaggcttctaaggttatgacagttccctagttcagcccaaagcaggtgacagaaacaaagggaaccttcagaggtcttactttgtttgcaattatattattccagtttgccttttttgctccaaacccagctatacgctccgatggttacaaactagcaaaagcacatgattgaatgcacgaatttcggatcagatgtctaggctttgtcctagatggcagagcaacatagtacatggtccagattccagaatcctgctgaccagtgttgcagcaactggcaccaatgttggttgctccagcatggcacgctcatgccattcatccactgaggatggcattgggattttcagagttgaaggtgtcagcgtcaatactgctagaaccagtgacaaaggtgtcctaaccctaaaaggagaaccggaacactgtgatgagggcatcatttgataatatcacagaaagttcttctaaaagtcatggctaaatgtcatactttatccaaacaaaagaagtcaatagcgaacaaaatgaggccttctcagatgtgcacagagctgatctaataccgtaatacggcaactatcgcatacactatcagaaacagaataatttcagttgtgtgatccaagtatccaacgaattccagtattggtgattgtgtactctcaaccgtacgacatcgtccataaagaaagcaatccaaaaactacagtactcctataaagacgagtaaaattgaagcttggtgcgggaggggacaagcgtcgagcacctggcgcgcaagcttccggtaggcggccttgatgtccttgttgctcgcggagcgcggcacgccgagcgtggcgtagtagtcggcggacgcccacaccaccaggcaccctccgcggcgcctcctcggaggaggcctccctcggtgcctcggcgcggcgcacgcgagcgggaggccgctcctagcggcggcgaagtggaccccgccgcggggagagaaagccgctgcggcggagcgggaggacggcgaggggttggatggcgcgaatgggagcgtggaggtcgcgaacgccattagccagcgctgcagctgcgccttctagaagcttctagagccggcgcgcgtgctcggcgtcgcggcggagttttatacggtccgcgtcgtttggggaagacagagctgcggtttgggatggggagaggggacgatgtgtgagcagagattgggccccaactgtcagtgtcgtagcatccatagattctttgttgggaaaattggaactatgccattataattttgtaaaatttaagatatgacatcctgatccacatgtcattgactcatgtggatactacatgtcattgagataccgatggtatatctcaaactttgcaaaattataatggcatggttccaatatcatggatttcttttttagactttagccatttttaaaaaatgttttagaaatatatcgtctagaaaacttattacagatatactccctctgtccagtttagtagtcattctggtacaggagtgataaaaaatggtattgtaaaaatgactaatgtgcccctatgttaatcattaccgtgcttaaaaattgatacaaaactagtacggcatctgtcattctgataagcctgcaacaaacatggagaaaaaaaattaatagaaatactcattctagtggctcacctatagctacccagccctaaacgacctcctttctaggacaatggctttaaccccagcgagaggtaaatcgagatggagggagtagaccctaactcaacattagagcaggtgcaataacaggctataagccagctacaaacatattttaaagagataaataaggagagagaagagcatagggctacatatttgtagccagctgtagcacggattccaagacgtactgtgtgtatgacaagtgggaccaggtattaatagtgtagtatgtaactattgtatggatgagctattagattggctatagatgaattagaactagtagttggctatactattaaacttgatcttagagtcattgcctcgttggttgccgaggttgaaagtctcaacaccagataaaacggtgtcgaagcccaaccctcgtgctactcggtctagtgtcaatcctctaccagttgcgtattttttgagaaacacagtacaaacataggtgctcacaatgcgcgtgcactcgtccctgtgaacgcacacactcacacatattaggattgatggagtcaccacaggcgcctcgctatcgatgagtgcgtcacctaacagtgaaagaataattaaccgtatatgtgagcatccatttcaagtctagcacttgaacccagtggagtggttttaccgcaaggaacctagctaattggttgagctatactcactttgcccacctatagatcatattgttttgcttgataaattagttactaaacacacatcccacatgcttgtactcctttcaggttaattttttttatcgttttagataagaatatgttcttataaacacaacttttaccactattttgtacttacagtagtatgtagaactatcaacaatatatgattttattgaaatactttttaaaattaatctatacatattgtttccatgttgctaaaagtaaatattttaaaagttatttgtagtcaaaatatttaaaagtttaacatctgtttaatttaaaacgacaattattgttaacttggagagaccgagagagtatatatatgagtacgcctctaacacacgaccaatgaggcagatatcaaaggtaaaccttgacctggttatggtatctcatttgtttgaacttgatctccaggaacaaaaattttacaccccatttcaatgtctgacagactcatgtgaatttctcatgatctaaatacaatcatattatcttttttttttggaatacgcgagacgcacatttttttattaagaggagtggtaaatacaatcatattatcaatcacatctatttgagccttcatttttttttcttttatacactggaaatggattacatttaacattaggcacctgactcatgtttgaaccttcaaggcaactacatatgtccttttctctaatctctagtacaagttacttgcaagttgcaactatcaactatgtaaagcatctggctagtagagaaggaagctggggtcgacttccttggcccaggactcaaacccaccggcgacgtcgctcgcatacaggaacccattctcgcggaggatctgcacggcgacctgggagtcattgcctcgccggcagatgacgtacacagggcagtgctgccgcccgtcgcgccgcgacgacacttccctcgccgagtcccgcagcagtggcagcttctcctccagcagcgagagcgggacgttgatggagtgagccatggacgctatctgaaaatggtgcgacggccgcacgtccaccagcaggtgcggcctgccgctgtcgagcaccttcttgtagtctctgcagctcacccgggcgttctccgggagaagattcaggctccgcgtcgtcgactgcaatcatcatcagttcaaacagagagtgattaggagtgatgccagggaaaatacacagtgcaattgtgcaaacttcgtgtgtagtgcaaacctgaaaactaccacatgatatataaatggacgtctaagatttgttcacgccatccatttgcgtatcctacgatagtttttagatttacactacatatgaagtttgcactatttattgatgtcatattgccatgcacagatatccgatgatacaatctaagaacccaacaaaaagagcgatccatacatttttggacattggagattgtgtgaagctctcgtaatcaaagttcacgaagtcctctttggtgaaaacaggattttctccacagaccttgcaagttggtgaactcctactgatcttgacctgcaggagtttgtgtaaccgtttatggcctttcagggagattgaaacagaggattctgatggttgctgtttaggaaattgagtcgatggacataatgaactgacttacgatcctggtatgagaggacagtgcatcgaagtgtagcattcttccacagagaggtttaccaacagcagttgcaacctttatagcctctaatgcttgaaggcagccgattactcctggaactaacaaacaaaaatgtagacattggatcattcatatagacaatatggatgggatattagaaaaccggcctctacatccacgacaagtacatttacatgtacctatgaagataatatacctatacctatggaattcctctacttattctactgtagttggtaattttcttcattttttttaagataatgaaataacattccggcttttgctcaacgagatacaaccaattattacaaagtccacacacgaacaaactcagcacacactgacataatgtaaagaaaacataaactaaaagacaccaacacaagataaaagaaccctcaattattgaattctattcgagaatctccatccgaaattttcttcatgttggtacaattagaattgagatgcagaaatttctcacaatttgatccacatgccttttcatagggtgtttttttgctacgtagagaagataattacttacgaattccaagaataccattatcggaacaactctgcgatgttggcgacgatggtgggtttggataaagacaccggtagcatggacttccgttgtgatgataaacagtcagctgttagagaaagttcagatgagtgtcactaaaatgaacagataagtcaaagtcgtcgtgttactaaaaacagcagtacctgtccttccaaacctactgctgaaccagatataagaggctgaaaggagtaaatgacatctgaatcagcacttcatctatgaaaaagtatgttgagcagaactgacagaagataattgataatggtcagttgttagcaactaaattttgaaaccataaagtagaaacttgccaggtggatgaagctaacatgacagaaagaagtgatttcagcttgtcggtgacatggggccgggggtatcgtgactagaggcttgggtagccgcggtcacccacgtggcctgaccccctcggggggggggggggggggtcgggcccgagggtgacgtggccacccctccctctgtctccctgaggggtcgggccgctcccgtttcggccccgagggctggggcgcccccgtttcggccccgagggctggggcgccccgaccccctgtggttttggcgccacgtgtgtgggttaggtgagcacagcggggctcacctaaccgcatttatagcaggttggacgagtgcgccacgccgcatttaatgcggcgcagcgcacgcttatccggtccgtgaccggtcgcggtgtgtgaccggtcacagaccggtcagatcgcgggttaggtggcaacaggcggcctgtcacacgcctcgccccgtcccgtcggaatgatgagagtttcctggctctcgtccctagccgaagccggcgtgctaactcctggagttggtatgtcagtcccggtcagatccattccaggcttcagcgcaagtatggcaaggaagtcgctggccattaaatgaaggttgaaatgggcgtccaccgggaaagcgggcgagcggggcaggaggcgtgtgctctgcttgtcagaggtcacttccggctgtagacgagccctcattgtaaaaagcatgtttcccttcttaggcagcgagaggcccatgtggtgaccccggaccagataaaaaggaggcccaggcctaggaggaaaaaggggaggaaggggggttgggactctggggaaagggttctagagcctgaactctctctcgctctccggctctctgtattccttcacgcacagatccaccagaacacaggagtagggtgttacgcttctcagcggcccgaacctgtctacgtcgctcgtgtcttgtgcatttcctctcccgctgacgttcctcagatcgagggcgaagaacctcacttagcgcccccggccgaaccagcaaaggggggcctgcgcggtctcctggtgaggagccccacgctccgtcatctggggcgccaggtagggggcgcgcgtgtctttctaagccctcgtcctctttcgtgtgcgccaagcttctcccgctcagcccaatggccgaacgggcagtggcgcacagcctctctccgaacgctagcggtgacgacggggagcagaatccgcgccgtcgggctcgcaccccaccgtccccctctcgccgaaatcttgggcggggggaggcgctcggggaggtcgaacgatccgcgacttcgccgcccgcgggcgacgggggaggacggcgagacggggcgcgtcgccgcctcgcctacggcgatggcggcacgccccagggcgcgctccaggctgcgggcgcgctcctgcgtcacccgcccgtcgtccccgatccagagactccagcccgacgttggctggatgacgtggccgacttggtcatgacggcgcagcagcgcctaggcgccggcgggcggtcctccgccaccgaggcctctggcgctaccgccgccggctccatgtcgtcgaggcggagggcgcggcgagcggcggccgttacccgccgttcatccgccattccctcgtcaacgcctccgacccaagaagatgtgcgtggggggccggatgcccgcctcgatatcgagcgccggcgcgacgctcgtcgcgccgcccacgcaacggagggcgcttcctcgtctggagcgccacttcggtccgggcacgggggccggccccccatgtccccggttggcggtgccagctgtcgagcctttgtggcgagccttcggaacgtccgttggcccccaaggttccggcccaccatcaccgaaaaatacgacggaaacgtcaaccccgccgagtttctccagatctacacgaccgggatcgaggccgccgggggtgacgacagggtcatggcgaatttcttccccatggccctgaagggtcaggcgcggggttggctaatgaacttgccacccgcgtcggtccactcttgggaggatttgtgccagcagttcaccacgaacttccagggcatatatccgcgcccaggcgaagaagcggacttgcatgcggtacagcgaagggacgatgagtctcttcgctcgtacattcagcggttctgtcaagtccgcaacaccataccgtgcatccccgcacacgcggtgatctacgcgttcagggggggcgtgcggcacaaccgcatgctcgagaagatcgcctccaaggagccccagaccaccgcgcagctttttgagctcgcggaccgtgtggctcgcaaggaggaggcctggacctggaactcctccggttctggtgtggcagctccggccgcccccgggtccgccgctcggtcagggcggcgggacaggaggaggaagaaggggtcggcccgttccgacaacgagggtcatgtcctcgccgtcgagggcgcttcgcgggccccccgaaaggggaggcctgcgagcgacaaaaagaaggaggccggcgctcccagcagggagcgcccgaccggcaagtggtgtaccgtgcacaacacctccctccacgacctcgcggactgccgcgcggtcaaaagtttggctgagcggacgaggaagtgggaggaggagaagaggcaggagcgccgtgagggcaagaccccggcggctcccgccggcaaccggcgaggtgaggccaagcagaaggccactgccgaggacatcgacgatggcgacgatgacctggggttccaggagcctgaggcctccgtcgccaccgtcgatgggggagcgtgcgctcacgcttctcgccggagcctcaaggccatgaagcgagagcttctggccgcggcccctacccatgaggcgacgcggcgggcgcggtggtcggaggttgccctcaccttcgaccagaccgaccacccgccgtgcgttgcccggggaggacagatcgcgatggtggtttcccccaccgtttgcaatgtgaagttggagcgtgtcctcatagacgggggtgcagccctcaacatcctttcccccgcagcctttgacgccatcaaggccccggggatggtgctccggccgtcccagccgatcatcggtgtgacgccggggcacacctggccgctgggtcatatcgacctcccggtcaccttcggtggttccgccaacttccgcacggagcgggtggacttcgatgtggcggacctcagtctgccctacaacgcggtcctgggaggcccgcgttggtgaagttcatggcggcggtccactacgcctatctccagatgaaaatgccgggccccggtggccccatcaccgtccatggcgacctcaaagtcgcgcttgcttgtatggagcagcgcgcggaccacctcgccgcggcgtccaagcccgtgggtggcgacgagaggctcagcacctccgtcccggctgccccaaggcagcggatggtcacgtgcgacgaggtcccggtcaaggaggttgccctgggcgacggcccgtccaagaccacacgaatcggtggtcttctggacaacaaataggaagacgcgctcgtctccttcctgcgggcaaacgccgacgtcttcgcctggagaccggcggacatgcccggggtccccagggaggtgattgagcaccgtctcgccgtgcggccgggcgcaaggccggtccggcagaaagtgcggcggcaggccccagaacgtcaagccttcatccgcgaggaggtggcgcgacttctggaggccggattcatccgtgaggtcatccatccggagtggctggcgaacccggtcgtcgttcccaaggcgaacggcaagcttcggatgtgcatcgactacaccgaccttaacaaggcatgtcctaaggacccttaccccctgccacgcatagatcagattgtcgactccaccgcggggtgcgaccttttgtgttttctagatgcatactctggttatcatcagattcgcatggctagggaggatgaggaaaaaactgcattcattacccccataggaacttattgttatacgacaatgcctttcgggttaaagaatgcaagtcctacttctcaacgtactactcgaatttctttgggtagccagataggacgcaatgttgaggcctatgttgatgacttggttgtgaagacgcgcaaccaagagaccttactctcggatctagcggaaactttcgaaagtctccgctccgcccgcataaagctgaaccccgataagtgcgtgttcggcgtgcctgcgggcaagcttctcgggttcttggtctctgcctgaggcatcgaggccaaccccgagaagatacgagctatagagcggatgcgcccccccagcaagcttagggatgtgcagtgcgtcaccggctgcatggccgccctaagtcggttcatatcgaggctgggagagaaggcactacccctatttaagctcctcaaacgctccgggccgtttacctggacggaggaggctaagcgggccttcactcagttgaaggcgtacctcagttctcccccagtcctggtcgccccggagccagatgagccgttgctattctacctggcggcaaccccgcaggtggtcagcgcggcgttggtcgtggagcgcgacgaggacaaccctcactccgcgcatccccaccctgtgtcgactcgacccgggagagagcagggaggagaggcccctgagccgaacggcggcccaaggcccccgacggccggagctggccctccgcctgcttgtccgacggtgccaggcgcccccaacccccaggatggccccggggccactgcgggaaggccgcgcctgtcgccctctgaccccgaggtcgtcggcacagaagccgagtgcgccccgcgtggcctctcggacgaagagcgccctggagatgcggcccctggcgaagaggatcggccccgccgaaaggtgcagcggcccgtctacttcgttagcgaggccctccgggacgccaagacccgataccctcaggcccagaagatgctttatgctattctgatggcttcgaggaagttgcgccattatttccaggagcatcgggtcacggtggttacgtcttaccccctcggccaaatcttgcataaccgagagggtactggacgggtggtgagatgggcaatcgaactctctgaattcgatttgcactttgaaccacgccacacgatcaagagccaggccctcgccgactttgtggcggagtggaccctagctcccgagcccgtctccgcccccgaggccagctcgggcccctcgcagcggcctcacaccgcctactgggtgatgcagttcgacggctccctgtctcttcagggcgccggtgcgggggtcacgttgacctcgccgagcggagacgtcctcagatacctggtccgcctcgactttcgggcgaccaacaatatggcggagtacgagggactccttgcgggactcagagtggcagctggactggggatccgccgcctcctggtgttaggcgactcccagttggttgttaaccaggtctgtaaggagtaccagtgctctgacccgcagatggacgcttacgtgcgccaggtgcggcgtatggagcgccatttcgacgggatagagcttcggcacgtgcccagacgggataacgcggtcgccgacgaactctcaaggctcgcttcctcgcgagcccagaccccaccgggcgcctttgaagaaaggcttgcccagccgtcggcgcgacccgaccccctaggggagacggacgcgcctgaacggcccccgaggcccgtcggagtccaggcctcgggacccgaggggagcgctcctagctcccctagattgattgcttggatcactgagatccaggcgtacctcgcagataagactctacccgaggaccgcgaagggagtgaacgcgtccggcgcatctccaagcgctacgtgctggtggaagggaccctctatcggcgcgcggctaacggagtcctcctgaagtgcattcctcgggaacaaggcgtcgagcttatcgccgatgtccatgaaggcgagtgcggagcccactccgcctcacgcaccttggttggcaaggcctttcgccagggtttctattgaccgacggctctcaacgatgcggtcgacctggtccggcggtgcagggcgtgccagttccacgccaggcaaacccatcagccggcccaggccctgcagaccatacctctttcgtggccgtttgctgtctgggggctcgatatcctgggtccgttcaggcgggccccggacgggttcgagtatctgtatgtcgctatcgacaagttcactaagtggcccgaggcttatccggtcatcaagatcgataagcactccgcgcttaaattcatcaggggcatcactgctcggtttggggtgcctaaccgtatcattacggataacggcacccagttcactagtgagctcttcggtgactactgcgaagacatgggcatcaagctctacttcgcctcccccgcccaccccagaagcaatggccaagtgaagcgcgccaacgcggaaatcctcaagggcctcaaaaccaagaccttcaacatcctcaagaagcacggcgactcgtggatcgaggagctgccagcggtgctctgggcgaaccgaaccacgccaagccgagcaaccggggaaacgcctttcttcctcgtctacggcgcggaggcggtcctcccatctgagctcaccctgaggtcccctcgggtcaccatgtattgcgaggctgatcaagatcagcttcgccgagacgacctcgactatttggaagagcgaaggcggcgcgcggccctccgagccgcgcgctaccagcagagcctgcggcgctaccatcagcgccacgtccgggcccgatcactctgcgtcgacgacctcgtcctacgccgcgtccaaacgcgtgctggactgagcaagctctcaccaatgtgggagggtccgtatcgagtgatcggcgtcccccggccgggctccgttcggctagccacgggcgacggcacagagctgcctaacccgtggaacatcgaacaccttcgtcgcttctacccctagtgggggtcgggtgtcatgtctcgggctcgggccaaccccgcacccccccgggcgtgcagggttggccgggggctaccacatgcatatacttaccttttttctcttccgtatttcaataaaagcattttcgatttcctgaggactgtgtctgtgccatcgtttccttttgaagaatcttggctcgaattagcacgctcgtgctcgaccctgccctcggtggcccgggtcggctaaaatcgccaaacggggcccagaaccgagccgtgccccggggcgtggtgaactccgggggggaatcggcaaaggcccacaatcgggtcatccataaccctcggtcaccgcgctcccggcctggccagtctcgacacgaggatctccccaggcactagccccgacccgcgccgtttgaggctgggacctgggcacgagcccttgttcaagccaagacatagaaggaccgcggcacagaccatcctcgtctcatacacacaacaaacagaactgacgcagaaatttcctctttacttgattgcagattaaatcagtctatacaagaagggggcccgaaggcctcggaagaagaaggaaaagttattaagattggcgggggcctaggggctcactccgacgcgcccgggttgccggcctcgtcgtcgctgtcgtccgcaccgtcgtcaccgccctcctcgtcgaagacgagcgcgaacgcgagccgaggggctgtaccctcgaagctgtggacgatgtggtcggcggcgtcccggacctgcgcgcgcgcgccgtcctcggttccgggagggaactcttccagcgctgcccacggggagaagtcagggtccctggcctggtagcttgccagcacgagctccaccgccccccgggcgaggtccctcgaggatgacttgatcgtctcctcgagctcctcggggagccgctcgagggccccggccatctctgagaggcgctgggcgaggcccccctagttggcggcgtacttcgcgtaccgcccgtcccagaggcccgcctgccgcccggcgcggtctagacaggagacggcgtcccgaagcatgccgggccctacctcgctcgccaagcggagggcctcgacctccccggcggacgagtccagcgcgccctgcagctcggcgatggtgtgttcggcggctgcgaggcgggcggctaggttgccgtggcccgcggccgccccgccgctgtgcgctctcgcgtccagctccttcgcccgcgcctcgagctcagcggcccgctgatccagtgcggccctctcggcgcgggtgccttccagattgcggcacgcctgctcctcccgcgctgcctcgcggaggaacaggctgtccgccagccgctgcgccgcggcctcggcctcctcgagagctcgcccccgctcggtgagcgcgtcctcgcggaggcggagtgcggactcctcttcggcgcaggcggcctcgtgcgccgccagtgttgcctcccgggtggcgacggcggcctcgcggtccgccaggtctctctccttcgcgtccagggcgcgggcgcgctcctccagcgccgtggcgcgagcctcaagggcctcttcgcgctgccgggacgccgcctcgttctccgccgcccgccgttcccgggcagcggcggcatcaaggactccctgggcggcgtcgagcttctcctctagctccgccgcccggctcccgtattggaggcggaggtcgtcccgcgccccgtcgagcacggcggtggcgatgagggcagtctcccgctcctcctccacctccctggcgacctccgccaggtccctacgacgggcctcgagctgtgaggcgtgccggcggtgtgccttgcagcccgcggctggaagtagcagccaccgactaccgtcggcggcgacaccggctgtacggtgaagaaccaccggaacagccggagaaatgggcgcaccccgataaacatctcgcacaggtgcgcgaagatggccaacgtcattatcgcgttgggggtgaggtgcgccatctggagatcataaaactccagaatatccatgaaaaaaatagagaatggcgggaccagccccgccattgcgaaagagaggaagaagacggaccgccccgggtagtgtggcgccgggcgtccctcgcccagcgcgaccacctcccggccggtggcagattccggcatgaatcggcgcggcagcccggcctgcctctcgctcacgatgcgggaaggcggcagcacgctaccgtcgagcggtgcggagccccgtgccatgacgccggcggaggagcttgagagcgagcgagtgcggcaagggtagggcacaggaaacgaagagttagagcacaagtggcgaaggcaaggggaagagtggcgagaggaaagaaacgaatcccttcctcggcgtctttacacccttgccaacgctatgcccggctcctcgcttcctgcgcccactacctcgccccctcgtttctcgcgcccacgcctccactaaccccactcgcccgtttgcggcgcacgcggcagatgtgcggccgtggcggttgagatggggcagatcgtgcgcgcattaactacgctcgccaaccgtgaaaagcgccatcatcatgtctccaggcgaaacgaaccggctcgtcccgattcgcgcgctgctcgagtaatgtagcggtcttgaagaggccgctcattattgtcggtcggttttcccttgccgatgcgcgcgatttgcgaccgctgggtttctacccgcctgtagggaccggccccacctgtcaccgggcctaaggagtggcgtcacgcccgagcacttccctcgaggggggcgatcgccctggcgtaacgccgggggctactgtcggtgacatggggccgggggtatcgtgaatacaggcttgggtagccgcggtcacccacgtggcctgaccccctcgggggggggggggggtcgggcccgagggtgacgtggccacccctccctctgtctccccgaggggtcgggccgctcctgtttcggccccgagggctggggcgcccccgtttcggccccgagggctggggcgccccgaccccctgtggttttggcgccacgtgtgtgggttaggtgagcacagcggggctcacctaaccgcatttatagcaggttggacgagcgcgccacgccgcatttaatgcggcgcagcgcacgcttatccggtccgtgaccggtcgcggtgtgtgaccggtcacagaccggtcagatcgcgggttaggtggcaacaggcggcctgtcacacgcctcgccccgtcccgtcggaatgatgagagtttcctggctctcgtccctagccggagccggcgtgctaactcctggagttggtatgtcagtcccggtcagatccattccaggcttcagcgcaagtatggcaaggaagtcgctggccattaaatgaaggttgaaatgggcgtccaccgggaaagcgggcgagcggggcaggaggcgtgtgctctgcttgtcagaggtcacttccggctgtagacgagccctcattgtaaaaagcatgtttcccttcttaggcagcgagaggcccatgtggtgaccccggaccagataaaaaggaggcccaggcctaggaggaaaaaggggaggaaggggggttgggactctggggaatgggttctagagcctgaactctctctcgctctccagctctctgtattccttcacgcacagatccaccagaacacaggagtagggtgttacgcttctcagcggcccgaacctgtctacgtcgcccgtgtcttgtgcatttcctctcccgctgacgttcctcagatcgagggcgaagaacctcacttagcgcccccggccgaaccggcaaaggggggcctgcgcagtctcccggtgaggagccccacgctccgtcacagcttatatgtactattacaaacagagatgatgagaaacaaagctgaactttataccttgttcatcaggacacaacaatcactgatcatgtaccgactaggcaggttgtttgttgcgtcaactactatgtcatatctgtgatattttagtagtgttggaaacaggaataagaacaaacaaaaggacatgattgatatttcctattgcattctcaaggatactgtcgcataatatccaaagcgttgctcgcattcaaagtgatatgatactcgaacaccttgatagaggagttaattctgatttcatgagaaacatatatagaactaattgatatcactttgtaggcacacataagtgagattgcttttacaatttatatatgatagattatctgcccaaatgataacatcttacgcacggcaagaagcagcagttgatttcacctttggttgtccaacatatgcttctatgtgtattatctgtaaaaaaacattgaggaagaatttaagatatttagcctcccttagatgttttacaaattacaagtcctattgttgccaaaagcaaaccatgtaagaaaatgcaagccactagtctatgaaaattaaaaaaaaaacttaactagtcaataagttctttccaccctgcaagttaattaacctaataaagtggcagtcgatgagagtgccttcctaggaagtcataacattataaatagagctccaataccatcacatttagaagaaagtgcaagagaatatgggggacaggtaacgggtacctgacgatgcaggttgtcaagttcaactcgatcgccatcaacaatacctaagcaacctaacaaaatacaccaagtagtaaatcaagccatggacgattaatcacaaaaggtatcatcgcattcgaagcaaaaatatctgttcctcaggagaagagacattctttccgaatgaactagtacgataattgatacctgatgaacagctcttgttgtaaaggaaatcgcaataatttttccaagtcaaattactacaatgtttagggtgataaaaaaaggggaattcgcttttaccgacgccacaagcagccagatacatggccacaggcgagcccaatccaccggcaccgaccaccaggatggatgattgggacagcttccgttgccctgaaataacaacgagtggatgaacagtggtagtacaggctagaagccaagcaacgagcgatgatgctgaagagctaccttcgaggccgaactgagggaggaggaggtggcgtctgtagcggctgatcatgtcggcggcggcggaggaggaggaggagggcgatcccgtgggctccacttcggcggcggcggaggggggaaggggagcggcgccgaggcggagctgcgactcgagcaggcggatgcggccgtccagctcctccctctccgcgcgcagcctctcgagctcgcgcatgatcgcctccgccctgctcctcccgccgtcgtcgtcgccgccgccctccattggcgcggtgccggtggggttgggtcaccttctccacggagctaggagcctaggagtagtagtaggaatagtactccagttgcccagttgcacggttgcaagggtgcaagggctggtgaaaacggttaccagccacaggtacgttgcgccaatcggactgactggcaattgccaatgtctatctcatttatttattgaactttttattacatggtagaccacatcactttacacctgcaatagcagccgctcacatatatgtgggatcggatccacctgtcagtcactgctagtataaatgcagtactgcagacgatccatatctcgtaacatcacacctacacacgttcaaagagacgaaactgacacacatccttgatttcactaaattttaatttaaaaaactacctacatgtacgtaatattcgtaagtactaagatttaaactctggtgagtagagtcatacacacacaattgcactatcaccgtactctgtgtatgatgtttaattggagaaaaaagggaggcagaacgctcagcaccgatgtgtatgatgtttaattggggaaaaaagggaaggcgaaacgctcatgtgcagaaaaaaagatagtaaggagaattcaaaccataacctccaatataacaagcgggtaacttaccactagactacttagtacaccttgctaagaaacatatcatcctattattagagatatttaaccatctgccacatttaggtgtggcaactaactttttgccactggaaccatatgtcatatacacatgtttaaaaatcaatgctaaaaaaaattatgttgaaaacattttaaaatcaacttaaaaattaaattcaaaaattcaattttagatgcttactttttggttatagtttttatcatgggtcatttataaaaataagttttgtgaaagggtcaaaacgtcaaaatttcgggcatccggaccgtgctttcgtgccgttgccatcatccgcaggcccaatgcacgatccaatactccattcttaatgggccttctcaaagcgaaagcccaacggccactcggcccgtgtgtctatctctctacccatccctcgcgcggccattgtccatttcctccctcttcttccttgcggcggcggcgggcggcggagatggcgcaccgcgcaccggttgccgcggagtcgggcggcggagggagaggtccgatgtacccagcgtctgctgatcctgcttcggcggcaacccctgctacgttccaacggtacggccgcgtcgttctatcttcttactcgcataaaccctagcgccccgtacagatcacttagtttagtagtaattccttttgcatcatttacgcaaatccatttgatgagatcctcttggtttgtggttgcacgggtcaggagtcggttctcagcggagtaattttactccatgaagctttttccgtgttgcatttggggattttttttctcccccgactccggttggttgcaatccttttcatttttacaaagtgcaaaacactgaaataggtttttgattgcttgattatttgttcttttatgagaaggggaaaaagaagggtgagtgcactgtgccgaatctgcttccctttaggcctttaggttggatgctccagtgatgactgaattcacatcatatatcgttccaattcctgaatgcagctcctatgggatgttgcacgtttgtggagatgaagagacatctgaggagttcagttccgttgttttttattgctcaatgtttgaacctttcgttttcagttttcttcgtttgtattttgttttatcctaaaagaactattccataaaccgtcggctgaacgactgcggttgcacgattcatatcacataaccacgagtatgttggtcctaaggtttcacaaaaccacaatgttaaccaatctatcttagtactattacaaaaataaaaaaataattaacttagattactacagcatttatacaatgaaattaaagaaactaatatatttcagatataagtttataactcatgtgcatgatacatcaaacaaaaaatagttaatggtgtggttttatgaaattataaagccataatacctgtggttacgtgtaacgcaccaaaacccctatggttttgtgcaacttggaccataatacctagggttttgtgaaatttattccttttttcctactccggtggtttgcattcctttgcttcctttcggtatgctccaatgatgactgaattgacatcatatatcgttccaattcctgaatgcagcatcctataagatgctgcacatttgtggagatgaagagacatatgaggagtttagttcattatttttgttgctcaatgtttgaaccttttgttttcagttttcttctttgttttatcctaaaagagctattcaatgctgctcacatttgtgtgcaaacatgtgtggagtttcaaatccgacagtttaacaagaagcctttttcttgtttgcagagttaatgatccaattgctcttgagctcctgagcaagtcaggcgagagatttcactatattatgaataagaagaaccttgtatgctggtggccaagacgcccaaataaccgagcaatatttgagggatgaggtctatgtgcacggtgagattgactgcattttcattgtcctaggcacatacataaacctacagtacaagtacagtacaagagagatggtgccaaaacagctgcagaatggcttactccaagttagtcataaaaggttttcatctggcaagcctcaagcactatggccagtgggatcgcccttgagtgctgtcgtcgttaagcagtagagcgcaatttcagcctagtggcgtagaatatcaacagcaaacaacattggcatatagtcttaacattcagtgaagataggacactgtgctcacctatggatccccagatagcatgtgccttggtccaatcgcatgacgaactcggtcaacaagctgcccagcatgtcatcacttttgttgtctgccattctgtcctctttatggtggtcaggctgctgtactccgcaactgcattgactggcaggtacacataacagcaactcagcaagcaatagcttagcaaagtcaaggacaaggtattcctggagagcaaccagattcaggctgtgtttagttcagcgcgaagtttggattttggttgaaattggagatgatgtgactgaaaaattgtgtgtgtatgacaggttgatgtgatggaaaaggattaaagtttgaatccaaactttggatctaaacacaaccttagaattcttaatctgtaggccttccccatgctggagaattgcattccaatttccaatgccttgaactgtacattaatgtatgtatatcatagaagcatgctcacggttaacctggtattcactcttcagaattaagtttaacaattagattgtgtaatcataattgccatgtatcaacaattcaatattagttggaagttggttttactgtgatttggaaatcccatgaattgaataggcctgaagttattggccgtgtttagtttcccccctattcctaactttccatcacatcatatctcatcaaaaacttttctacacacataaacttttaattttttttacaaactcccaactttcttcaaacttctaacttttttcaagaattaaatacacccatcataaggtaggaagcgagaacaaaataaatactgtagtaagtatacgtgttatgctcacttttgtagcagtacctttttttcccttttggcacttgaaagcaaccttttcaatactaaaaagatatgcattacaaatcttcttcgattcgaattcagtacaaattttattcaactcgaaatccagcgggagcaggagcaatgatcatccttaaagttgggagaattgccgcacaccaactgacgtgtggggcctccaaaccgcaagtacacctatgctggcaatgctgcccttgcccctctcccgccaacgaatccctccactccccaaaagcaaaaacgcgcgcgaaaaatttcaactcccgcgcttctcccaccgcatcctctctccccttgagtatttacttttcaaaatacataaagaaaggaagggaagccgagtgatcacatcgccgcaaccaccaacctctcgaggccgttcgaatccctctctctcttctccaattccccaatcaccgatcaccgcgccgccgatcgggttcgtgtgtgtgccctcgacgtgttcgacggaaagcccgcgagaagcggaggccggctgcggcgacggcgaggatgtacgtggtgaagcgcgatgggcggcaggaggcggtccacttcgacaagatcaccgcgcggctcaagaggctcagctacggcctcagccaggagcactgcgatccggtcctcgtcgcgcagaaggtctgcgccggcgtctacaagggcgtcaccaccagccagctcggcgagctcgcggcggagaccgccgccgccatgaccgcctcccaccccgactacgcctcggtaaggccctccgcgactgatccgtacgctacacgcggtcgtctggggcgatccgatggttattgactggatgtggcgctgattcatttacactgtgaagctcgccgcgaggatcgcgatctcgaacctgcacaagaccaccatgaagtctttctcagagacgtacgttctgatcccttttttcttatttgctggtatagaaatgttgatgatctgtgttgtgaagtggttacgttgatctctgcatgcaggataaaggtcatgtacatgcattacgatgagcgatctgggctgttggctcctctgattgccgatgacgtctatgagatcatcatgaaggtgagatacattcttatcaaaatcagtttggaagttccttaacatttttacagcatgtgtgcttctgcaatatggcatgcatgaagattgcaattaacatttgtgacgatgaccgcctcgcaaattgttaactgtttatttgttttcttatgatattattcccccaaaaagattgtttccgaatcatgtattgctgcaatatgtcactttctatagaatcgcaccaataggttgttcttcaacatttatttactaacattttattcacgtgtattgccgtgactctttgtttacttctgttcttttggatccattatgatgcttatgttgcccgtcatttggtttgaaattcatatttgatgatctgatatttgtttagctttattggctttgttggagttcttgaaattttcttatatcaatgctgcttttttgcgttgttcaatttcttgtgtggatatatttcttcaggtgcttcaattttttattatatgtatattgtgccaatgtgacttgataatttctatatgatgcaccatttcagaataccacccgcttggacagtgagataatttatgacagagattttgactatgactactttggttttaagacccttgagagatcttatctgttaaaagttgttgggaaggttgtggaaagaccacagcatatgctaatgagagtttctattgggatacacaaggatgatattgaatctgctatcaaaacgtaccacatgatgtctcagcgctggtttactcatgcttcgccaacccttttcaatgctggcactccaaggcctcaagtaatatgcttcctaccattgaagtccaatttggattattaaaaatggtctcttatgctcctctctgttttatgcagttaagtagctgcttcctcatctgcatgaacgatgatagcattgagggaatttatgatactctctcagaatgtgctaccataagcaaatgtgctggtggaattggtctctcaattcacaatattagagctactgggagttacattcgaggaacaaatggaacatctaatgggattgttcccatgctgcgtgttttcaatgatactgcacgttatgttgatcaaggcggaggcaagagaaaaggtaaataccatcagttagttagacatggacctaatttacatgttcagtgttcaggatttcttatggattcctaacattaatttaggtgcatttgctatatacttggagccttggcatgctgatatttttgagttccttgatttaagaaagaaccatggaaaggtaaaggctgttgaaaggatgcattttctgatagacattagaaattgataacacagaaacacatttactcaccatgtgcaattcgcaggaggagaatcgtgcaagagatcttttctatgcgctctggattccagatctgttcatggaaagggtgcaaaataatgaaaactggtcattgttttgtcccaatgaagctccaggtttggctgactgttggggagatgagtttcagaatctgtacaagaaatatgaaagagaggtaagatgtgtgctgggtgtgcagtttattgaagtaatatctaaagaatatttgttaacctagcatgcaatttcagggcaaggcaaagaaagttgtttcagcacaggcgctctggtttgacattttgaaggcacagatagaaactggaacaccatatatgctttataaggtgtgcaattcataaagggaacagtagtttgcctacaattctgttgccacatatgcttatttctgaaatctggtctgcaggattcttgtaatagaaaaagtaaccaacaaaacctggggacaattaagtcttcaaacttgtgcacggagattattgagttcacaagtcccactgaaactgctgtgtgcaatctagcatcgattggtttaccgcgttttgtaagggaaaaggtatgcactatgcagtactggctgtataatttttgatttgttgtaggttgaaatttctgtatctcacgacacaaatttgttcagggtgttcctatggagtctcatccggctaagcttgttggtagtaatggatccaaaaaccgatattttgactttgataaattagctgaggtttgtgtttaatatttacttactttatgcctcttccccactagcctgaatgctactaatatttgttggttattgcagattacttcaattgtcacaaggaatctcaataaaataattgatactaattattaccctgttgagactgcaaagagatcaaatatgaggcacaggccaatcggaatcggtgttcagggcttggcagacaccttcattttacttggcatgccatttgattcaacagaggtaaatttttccaacctaaaaatgtggttattccaatctatatatacttcgctgaaatgcgatgcaatgatcttttcaggctcagcaattgaacaaggatatttttgagactatttattatcatgccttgaaagcttctgctgaaattgctgcaaaagaaggtccttatgaaacttatagcgggagccctgtcagcaaggttagtgcctgatgtccaataactttcccagcatttatgttgcaggtgccaatccggccaagaaaaatgctgcctgtatgatttgctattctttctcaagtagtttaagtaagatattgaaactcttagggcttttgaattgaaatgtcattttgttatttgatatctgggttgcaatagccaatactatgttctaaggctgtactcaatgcatctcctaccagggcattcttcaacctgatatgtggaatgtagttccatctgatagatggaattggtcagatttaagggagatgatttccaaagttggagttaggaactctcttcttattgctccaatgcctaccgcttctactagtcaaattcttggcaacaacgaatgctttgaaccatacacctcaaacatatacagtcggagagttttaaggtctgcaaatctgctccttgttaaacgttcaaccgttgttttggttacatgaatttttgccagtctgttttggtttacatgactagtttccttttggcagtggcgagtttgttgtagtaaacaagcatcttctccatgatttgactgagatgggtatttggtcccctgttctgaaaaacaagattgtctatgaagatggttctgttcaaaagatctctgagatcccagatgatctgaaagcaatttacaggtttgtgaattatcatgtcagctatagtctcataagatgccaactatcacttgtgtctaaatgtatcctgtcattgaatcagaaccgtgtgggaaatcaagcagaaaactattgttgacatggccatcgatcgtggttgttatatcgatcagagccaaagtcttaatatccacatggaccaaccgaactttgggaagctaacttccctgcacttccacgcttggtccaaggtaaaatttttagtttcagttcatgttcaatttataattctgcatcaagttcttctacagttcacgtttttgcagctatcttgaatagtatatgcatgaactaaattgtttgatgccagggcctgaaaactggaatgtattatctaagaacacgcgctgctgccgatgcaatcaaattcacagtggacactactctcctcaaggtgattcgacaactatatacagattttgcatcatattttacacatgattcttaccctgagaaacgctgcatgtgcaggataagcagcataatgcagaggaagaggatgtccagtctaaaatggcagaggtggtgtgttccttgaacaaccgggacgaatgcttggcatgtggtagttaggttcgtccaaatcacatctaccttatcctgacctatatatatgaccttatactgcccctaggctaaaccggcttatctttcgatctcaatagtggtaacccgtgtttggtgcactctgaaattctggattgaggctatcagacaagacttatttttagaacttcaccgttggcttgtatatttatgcttaggctactgtgactgtatctatctaaatctaaacacctagtgctttcattctattacctctgtactaaaatatgagaaattttagccatataattatatgagcaaaatccattatacttttattctattacctttgttttaaaatataagaaattttgcctatataattatatatggacaaaatcttttatgttttaggatggaggtagtatcgtctatgccatgttctcattctcatacattactagtaaatatttatataactgctatgtattaactgtggcattttataatttgtcatccttagacatgaatgacatacatacaatttaccatcgtggcccaccttcgatgactaagatgatttcattgagagggaattgcacctctaacataatggctaatagtcaattagtagcaaaagatggaaactagagatgttaaattagctatgtcagattcatgtgcatagcttgatttattttagaatacgactactacgtactggattattccgagactcctagtatttctatacgggcagaggtgttgatgccatgtctgagcctgtcgacgagagaatcaacgtactgcttggctcctggaaacctgagcctcgacctggccagatccggcgaccggagcacggcggcgtcctagccgtcgcactccagcgactcgacgcccatggcgaggagctccaggttgacggccacctccatcgccatcctcgcgaacggcaggtcgacggcgacgccgaaggcgtggcggatgcggagctcggcgaggtggtggtgcttgaaccccggcgatggctgccgcgccggcggcgagggccatctcttgcgccactcggcagagcacacgtggttgtccgtctgaagcaagaagaggaagaggattatattagtgctactattaataatagtatatatactacttcctctgttttagactataagatattttgactttagtgaaagtcaaactgttttaagtttgattaattttgtagaaaaaagtagtaacatttttaagtcaagacaaatttattataaaaatatattcaattactaatttgatgaaactaatttagtattataaatattattatttttatctataaacttagttaaaaatttaaaacagtttgattttaatcaaagtcaaaacgtcttataacctaaaatggagagactaatatttatctataaacttagttaaaaacttaaaacagtttaattttgatcaaagtcaaaacgttttataacctactcttgagagtaattaaaatttagaaactcacagcaatagtgaaagtttctaggagtggtgccgcttcaagcaggaacgtaagggttgtttggttcataatcacatgttgccacactttgccacaccccaatttaggcagctttgattacattagctatgtgtttggttcattgtcacaattgtggccagattctttttctagctttttggtcccacatgtcattgtctcaagaaaagtgtgacaagtttgtggattcttagccatagcgtggtgccaaatttgttcgtctaaccttagacaaacttgataaaaaaaagctatgataactctagacaatgttagtatataaatcaaacaaccccgtagtacatgagagaaagttgcgtgtgtgtgtgagatgtcatccagctcaagcttctttaggccgccgagttggattgtcagctcagctgctcaaggggctcctggttgtacccagatctgcatgcagcacatacacgtcaggttgtcaaagcctaacccagggttatgggttcgacgaaaaccgtagaattttgaggtttcgacgcgggacgaagtagattttgaatggtttttaagaatttaaatttaaagcggtaaaattcaaccaaaatttgatcaaagtttgtcatacatacatatatatatatatatatatatatatatatatatatatatatatatatatatataatcacattttataagttgtttgacttttttttcttaaattaacatttaaattattaaattaagtttgataatatgtttgttttatgatgaaaatactactatgtttttctataaatttgattaaacttaaaaggattttactaagaaaaaacttataatatgaaagatagaggggattacgatagaggggattacctttgtgccgaaggacttgatgcaaagccgctctaattgaccagggttttctgggattagcttactaagcttccatttaaaatcgtaaacaaccccatcattatgctcctcgtcgtagaagttttctagggttatacctttgagcgacggtgttccgccgtacgagaccgccggctcgccgtcgagccacccgtagtagcttgggcgcattgacaagctcgacgccggcggcgtggcactggtcgaacaccagcgtcgccagccgcgactccggcggcgcgtcgatcgtcatcacggagaacggcacgaagccgcagtagaacatgtcgaggtactcgagggcggggcagccatggaggaggtgggtgatcgtggccgccgtgtcgccgccgtcgaaccagaggttgtgcacggtgagcctcgccagcgaccggaacgcgccagggcaggctcgccggagccgcgtgaagcggcggccattcccgagcatgagccgcttctgctcctcgtcgtcgtcgtcgacgaacgcgcaggcgctctcggcgaggatctcgagctcgacggcgccggccttgaccctgccggtgtcgaacgcgtcgccgacgagcgcgccgacgcggtggacgcggtcgtcgtccgtcgtgaggacgagcttgaggtggagcttgtcgatggcgcgcttgctcggcggcgcggcgaggaagctcgccagcgcggcggcgaggttgtcggtggcgcgccggtggtgcacctggagcacggggcggcacgcgttctccttgtccgggatgaagtcgtcgacgtcgagggagacggtggtgatgtcgtgccatggcaggtgacgccaccaccgcgagaggatgcaggtcctcgcggcggcgtgggcgtcgccgtccatcaccaccttctccagtatgtcgagcaggacatcgtcgggtagcccgctgagatggtcgtctccgccgccatcgccgtcgccggcggcggcggcgcacgctcgttgctcgccgtcgtcgacaaccattgccactgatgcacgtaacgtatcgtgggtgtgtttccttctaccacgacgacaatataatcgtaaggctgtttcggacacgaacacaagccgtagaatttcgtcacgtactgcagcatgagtaagattcaaaacggcgtccaagaaattttcctattcgggcagggaggctggtcatttttctttcattaattttcctcagtcactgatgcacacagcacaccaggcgtgaactgatgagtacattggtatcttggtgatgaatctgaatatttcacattgtacctttctactactatacaatatataggaagaatgaatgagaaaataactatttttgatcaaccaacccctccaagggagacagaaaacagaaagaaccacgtagaacaaggtacgcaaatggagaggactatcacgacaataatgtaacaacaaaatggcactgaccgagcagtactatagtccggcaggaaaattgctcacttggccttgttccagtctgtcctcaccattcactttgtatgacatccggatacgcattgcaagtggtttctgttcagaagaaaagcaaagcgaaatcagctataagcacaaggcaaataggtccaaaacatgagaagaaatccgtatgttctaaatctgaagacctccataacttgaaagaaaatcatgaatttcaaagactgaaatttctgcagattatgcacctgtcagaatggtatacacatgttgacagcagacacgtgtgcataaaaagtgaaacggcagcgaaggatgcaagtctccacatacctgcccatgttggttattggtgacactgaacccttgagtaactgaaccattgccactagctggaacaatgttgccactagctggatccagtcgcaattggataaactgaaattcatttggacagttcaagaaacattcccatcagtgtcatcaaatattttagccttgttaaactagtagaataaaatgaactaaaacacacttgccatttttttagcatctgtttcaattgctataatgtaaatttgtatagagagcttcaagagtacaagatagacaaataaaaccatataaattaataaaagaacaaagaatggtcaaccacatggtaccactaccaccacaatagaagatttgcgcctcaagaaactattacggaaaattataattgctcgtcaagtgagatttgagaacttgcatgccataacactaatgcaagtaaggacagctcaaatatagaagacaatagataaaggcgccatgatgctacctttggaacagctgcctgaaaaacaaaatccgtataagaactggatgtcaaatttgtaaaagtagcatggacggtagtctcgtgtggtttctcaggctgctttttgaaattgaagttgatcttcaaggttgcactctggaaagctgttattgatgagtgattaacaggtcctgctcaaataaggaggtttattagtaatcatgacagtattatattcagtactttgtagcaaatatctaacatcaaactaaccagaaacagatgtatttgatggcagaccatcaagcaaatccatatcttgaggtactgcaggagcggatttggtccctgcaatggaagtgtcagacattttggcaaaggctgtaatagaagcaatcggtacgacaagcatgaaacgaaactaaccagaaacagatgtacttgatgacaaactactgagaacatccgtagcttcaggtacaatcgcaccgacttgagagatggtagaaacaggtttagtatcaggtacattaatcttgaacaattcagtgatggctataagaaaatatggaaatacatgactagcacaattagaattacatttaccttgggcaggagtagagtctgctgctggcgggccattctgtgatggagatgatccgatagatagaagatcaataagaatatctgtgcttgcggatgaaggtgcagctggacataaagcaaaaagacatttagtctaaggtaaggaattctatagcatgcaaaaagaatgtggcaatctaaactaacataatagattggaatgcaaatatttcagacgttgcggcagcatgtgaaatgtgtactatattatagttgcaattattgcaaaagcaaaaactaactgatatctttttgtgggacaaaagaaggcaaggaggttgcatgcacatttttggagcagaaactgctcgatgctatattgacagaattaattttattggaacagaaattgtacgatactatattgacagaatcaacttttagggcaaaaatatacagctaattggaaagacattgaacttttggccccaaaatgcagcaaaaaatcagtacatgtcagcagggaggaagggagggactatcagactatgctgcttcatttatattacaagattagaaaagtaacaaggaagtccaagtggacaacaataaaaatattgaaataaatacctgcaggtgatgaacttatcccaccaatacccagaaggtcttgtaggaagtcgttaggtgctgtagtggtagaagcagtggtaatggctggcacatcatcagaacttaagtcaagcaaatcaactaaaggactggtggcaggttttgctacaccatttggaagcttaaggcctccgggagtgactgctggggtaggcttatcagctgcaagagttgcttgtgtagcactagccctcctcagcaaataactagcttcatccaatgcaggcatacgctcaagcaaagatggcctgcactttcaccatatttctctaacattaatacctatattaagtgccacagtattgaagaaagtttccgcgatagcatccaaaagttctataacacacctgatagactgatgtctttgtatgatggaactgaattcaattgatctttgctgtagttcaagcacaatattctttttattctgggaaactatttgctttatcctcctgttaatacccagtaagattgtattatttaaccaaacagtaatacaatataagactaatctagataaaactagctccatcaaagaagatgtaataagcctgtaaagaaggtacttcaaaataaaagctaaaatgacgagcagctcatacacagcagcacatcaatattattggggcaaaattggtttccactctactacttcccaaattttagcataatattcaccaggaaaaaaggcacttcaagttgaaaggtatattactctgatgtcgatggaaatcgtgacgagagcttcaaaagagccacaagacacatagctcgagttgtcacatcagcagagtaacggttaagagcgagttgtacagcatccacagcatcagattctgttacctgaaaaaaaataatgtgttgtggcatgatgtctcaaaacatactgcacaaattaatgctgccaaattgaatgtttgtactacaggtgtaggcaacctatataggacaatgatcctaaactgaccagttgtcttcaactaagtgcccgaaatatgtacaaaaccaactaccaagaacagctaaataaatgattgcagaaaaaaaaatggcaataataatctgcaagcatagactacatggttaattagcaaaagcagaaatgagaatgataacaacactggtggatcatacaaaaatagaaaaagtacaacaatgtttcaacgttagggacataactggaagcttttctttagccagatcaaaaggtcaaaaataatatagcctacaagaattctcctctcaccgtaataggttcctccccttgcagcatgccaacattgttaactagcatttcaccatattcaccgatgcaccaaacagccactcttactaaacttccctacacagtgtagtgcaaccaagttacacaaatcagttaggttaaggtggaacaatatgcatcataacaaacacatttttttttccaaacctgatcgacaaatgcttgtagagccatgtataataacctcactgaatatccttgaagttctgatgcattgcttattacaacaacgagggcatgccacacatcatccttcacatgatttccagcctgttaatcaacaagagttcagcatgaattgaagacattttctactattggtcaaagacagacgaccagaagatatatctcatggatgcatgcattcaataatatcagcataaaatataagcagtcctgacaaatgtgcaaaagttaccaggaaatgcaccccccaccccccacacacacacaaaagaagaaataaaaatatttttatagtaggtgtccaccatgaagagtgtcccactggtaggtttctaggaaggaattgctgaaactgaaaagtatatgttctggagcacacacttttcagatgtgaaatgccctactgtactttggtacttaccaaggataaaaccttgaacatctgatcaaggtaccataacttctcttgagaaaacctagcagggatgcaacactgttaaaagtgccttaatttagcaggaaaaattaaaatatgtgtatatattggatactaacttttcaactattgagcatatcttggcagtgagatcttctttgaaatccggatcagctgaatctaagtagtcgacaagctctttagtcaaaggctttacatttgtatcgttgactaacaaaaaaacaagttcaagggccctcttgcgaatagaagcatctgcatcctgaaaggtccacaagtaatttaaaatgttaaaagccaaaataacatgattagattctaggaaggcaaaaacaatagatgaccaagctgacttaagcttcaagattgcaatattaatcatatatagcaagtattaaggaattggtcattttaaaatagtatatgtgaaatctttgttttacttgaagtatatataataaaatcttgagttaaagattactttgaaagagcagtaccaacctaactggattatgttggtcagataacttgaatccagctttagctacagtatccaagagaaattttctactccaaggatgcatagataactcaaaacacaatctctctacaaaacttatttaggccctcttttttctaagattttttgaaagttgaattgcccactgatcttcactagaagacagacgtccaaaaaataactagaatgatatttccactgttacctttacacactccaatattgtcgtcctgtgtctctgtactgcctgtgtatctacagtaatggccctcataagcatgttcagagcaacgtatctgaaagaatgacatgcatagtaaatacttggtctaggggaaataggtgaacattatgctaacatatacacaataaaaatttttgcctattgagagatgggtgaccattatgctaataaaaagaacatcgtagcctcattcatgtcgtgtatggtactatatcaacaacaggaaactgatataactcaaggaacaggcaaggtttaaccttatattattatcacgattcgacaagaatctacccaaaatattgatcgcaagcacacgtaaaccactagtagcttcaatacccattatagtctgaacacattcatacagaatggcattagcagcattcttatttgactcatttttcgttgcaacctgcacaaaacaataccatggttaatattccatccacaacaatatgaaaacaagttcaattacaaaaacaaagaagtgcattgttgtaaaattttaaataaatatggaagggaacatgaaagtttaacagtttaataggttctagaatccaaaacatgcagcaatgccctaagtgtgaccttctgaaacaaacctctagtatgaataacacaacatgaactacaagcgccatgtgttaaataagcaaatatgctcttacataaaaaaaatgcaaactaagatcctgatgatatataacaaatatactatattgtaaaatcaatgccctgattgggaggcaagtccacaggacatatggcagaaaccagaaaaataaaataaaattaattagtaaatctgacataggaattgactagatggtgcatgttttgtatggagaacaaagtgtcagtattttgtatgtgaaaaaaaaggatatattcaatcacctgagcaagaatatcattcatatattcactgcagtctgcatctccttgacccaaaatgcgcatcagtttaagaactcgaatatgcaagaaagggtctgatatgccagcaacgtcatactcaggagcataagaactattggagacatctctcagtatgcgcaccaatccttcaacgcagttctgcagggatttttaaaaaaatgttcatgagaacagtgccgttctcaacatatagaatattcacaatgttgcgttatattctagaatgtgtgtgtgtgtgttttataagcatgcaactaggagcgatagtgtgctcctgtgtggtgccactgatgatttctggggatattgcatttctgtaggtaaaagttttggtactaacaacagaattagttgagcagctaaatgaataacacataagcaactgacggtcattccttaatatagttactgtaaaaacggcctaaggggtacgaaatactggtacatacctttctcaggtactctagtgcatctttgctggctttacacagttccgtgcatagttgaactgcagatatcagaatcccatgatgtttctccttcaataacgatgaagcaagacccatgaagttttctgccaagtctgggacttttctcacaatccttatagcacacaaagcagcctaatgaacaggggagaggatatagcatgaattcaaaacggaaaaaaagtgacctacattgttttgatgtgtgtattaacagataataacttagagctagtgtcattggcatttctgtagaatgcacaattccgtaatcaattgaggtttcatgaacccaatctctaaaaataacaacaataaccaacaaatctcctgtagctttttgttttaataatggaatattggcatgaatacactaatccagttggccactaggaattgaattacagtgagaagtattcctacctttttctttgtgttaacgtccctgctacgcatcagcctctccacttcaggcgacagatcccgtgccatttcagcggagcagatattcccaagcgcacacaatgcaagccccacgatgaactggttcgagtgattgagatctctgccccccaaattaatcactaaaattactcaaaactcagaattacatgcgaaaaacagaactcgcagcagcgcattgcagagataatagagtctggtggtgtactgtttgagggagttggtgacgagcatgagcacctcctgccgctcgtcgaggagcagcatgaggccgaggtagccgatccgcttctccgggtatcccgcggcggcgatgagcttgaggcactccatctggccgaagtgggtggggtatccgagcatatggatgaacatgagcttggccatgttccggtgccggatctcctgctggttctcgccgatggcctctcgtatctccgcgcactcccgccgcaccaccgcccgctcctccgccgccgtcttgcacgcgcgtatcgcccgtatcatgtccctgcgcggcaaggcaaagctcagctcatctcagaaattcgcgagatcacgccattgcgctccgtgcaaacacccatacggatccgaattcgagaggggcgagagcggaaaaccccaccggaggcgcgtgccggaggagaaggggcccatggcgatgtcggaggcgaagtcctcgacgatcttctcgacggtgtccattgccggggggcggggatctcgtggaggggggaggaggagagctcgcgtggatctggctcccgcgcgaggtggttggagcgggaaggcgaggcgaggctggcagaggaggaggacgaaggctcgccttggatggatctgaacttctgaaatctgaactgaaaatggtggtaaccgtgagaactgcgggtacaccttgctggagcagtgaattttgcggggatttggagataatttgtcaaatgcaaaacccaatgtaaaaatgtaaaatgtgaggaatggatctgtgtggacttttttgttttgtgaatttcaacatagaaatcgcggagaacgtttgtcgtgtgaatttcatgcattggtccttgaatattcttttatgtgtgacttagattattccattattcgcttcttaattactactagtttgctttggaacgtagaaaatttaaagaattaaactagtttctataaacattatatattctttttattccaaatgagataattatatatagattaggatattgaaaaatgatggataacttgtaatttcatgttggagactgaattggcattcaactactccctccgtcccaaaaacatgtcgttttgagattcccaagccaaattatcttgatgtcaaaaagactaaattgcccctacctattcgatgtggttgtcatttcatcaacagggatgtcccccaccatccgcttgctatggttgttctagcaatccaacttctgtatcaagaacgagaagacttgacggaacaagctaggtccgtcaggctaggtggccccacctctgcaaccaaacttttgctataacaacatttttttatgggacactactgaggacatagaacgacacttttagtgggacggagggagtatttcatatgttgagttcaactatttgtcaaatatcatcgttaattatactacttgttctaaaatatttgttcatctaataatatatatggatttgctaacctccgcttgaccaaagttgcccccaatatcttacagactttggatcctccaattcgatccaagatttatgatgcaccaccatcttctcctgctctggcaagctggttgatctttgttaacagcgttaacaaccacaaccaattaggttttgggttttttttttgggggggggttccttaggtgtagagggatgtcgggacgacgacggtggcatggtatgctagttggcgatcgaatggtggtaaggcggtggcagcagtgcggcaagacggagaaggacagtggatgatggtgcaacgggggcatctctcacctaagtggttaggtggcagggacacctcattgtgggccccgcttggggagaaggaaatggaggagaaggtccagcaggcctcgtctacacctttgctctcttccagcgtcagcaagtcgaggaggggcggtggcagtggggtcaagttcgaaaatgcactagatgcggtaacaatcgacggagagaagaagaaaacgaggtagcaagttttaggtgtttgtataaatctcaaagcgacccaacgccccaaaattcacaatatattagggaggaatgtagagtagatagtccctaataatagcatttaatttatcgttgtaatagagtggatcatacatcacttttcacttgtcaatattggaacgtaaatacaacatcacctttcttgtagtgaatcacagctaaaaagagtaccacctttctcctccgcttccttgaaaggaaacaagtgagagaaagaaaaattgaacttatagcaagcaagatgccggcaggatcccaggtgctttgtcaagtatatatcacatgcttcagcttggactttgaatgttatcaagcatcaacctattcccgaagaatcctttgattctgccgtgttttaagttgttcaccattgacattttcagctggcatatcatcacacattcgcatgatcaggtcgcagagatataatgatccatggaaatgtggaatatcaactcgagtaaagtattcagggagcctataaaaaatcacttttcatcatcgtatttatcaatgccgatgagtggtgagcgcgaggatgtagaagatatatcttgtatcttcagaatcttcagataaccagtggtctcatgctccaaagatcgaacggcagctataagcataaactagcttcccacgagctactttctctgaatattctctccaacatgtgaattgttaaggcaacaaattaatagagtgttatattataaattgattctataaatagtctgatagaatgaatgcatataattttctcaagaaggtgaatgattaataatagtagtatcaattaagccattgtttaatcaaatcaaacgcgaaatagcagcagcagcagcttggaatatctgtgtggctggagggagaagagatcgaatcgaagctggtgcggcgcatgaggaatcgaggagtggaagaactccgacagcggcgagtgggacgggacaaaggtgtccatgagacccgccatgtccgggggacacgccagatacggcagcttccctctcccttctcctccaagccattagtggttcgtacttagtacttacgagtagcttaaggagcagcttaagatatagcaggaggagcacattgcagttgattactagttggagaaaaaaaaagccggattaatatgtgcaaatgaaaagcggttgattagttgtttatgtcaagtcatggatggcaacgaatatctcgtgctaggagcatgtgctcgattttaataatggttgtgtctcgaggattattgtaacgcgggctgccgccgaatgggcgaagacacttggcatatctctgaaattttggctcggggtgtttctccctttttaaaataaaatctttggttccgagttaaactcatcgtttcttctgtagctggtcataagctgtaacgatttttatgaacaaataatttacagtaacatttttatgttaacgatttaaagcaagtcataaaaaataaaactataaaactaacttttaaaattcaaattttaacaacaacatacaagttaaagagcaaacggtgagctgtagtagctcttttccatgtctgcatgagtttttgtgttttgagtagtctatatcggccctgtttgcacccgtcgaagattgaaattaagtacgagcatcatgtaaaacgataaatgaatttcaattatttattaatttggaaaacgtgttatcaaaatccatataattttgtattttaatcagattcaaacggggggcatctgtatttttcatgccaatgtacacgcttggcttgcatgtgtcctgcatcagcaaggcaagaaacgggtcaaaacggaggattccacagcaggctgcgctacagctaggaacactgtcaagcagagcagagaagcagctggtttgttgatggatcgcgcgcgcgccacgtgcttgacggcgcgcaggaaacagccacgcccacggcccacgcacaggcgcacaaccacctccccgggagaggcgaggcgaggccacatgcccggccgcgcgccgccttccgcgccgacggcaacatcgcgcgcgccggccggctgggcggctgacaaatcctggctgccgcatctcatgcatgcctagcgccaacgcgtctcccaggccgaaccggtcgaccctcgtttctgattttcaacctgattagtatgagatctcgctacggttcgtttaaaaaaaagtttaactaagatagtaaaaactatggaaataaatggttttcatgttgtactgatcgttatcgttatggtattctagtgggaaccgtatttctaaatattcttataattttttaacatgtctctatttagctcatagtttagtgatgtattaacttctaactaaatatctaatttaaggacataaaatagacatatatacatagtttgtactaataatttatatagtgtaacattgaattaaatatgttatacattaacaattacctgttcccagttgataccagcatgttttttttgttcgtgtagttatatgatacggtttttgtttccagctttacattttcgatgacggagaaaaatatagttacgaaaatggtatttcccggccgttttcattccaaatgcacgtcaacgcccaacggtgcaacgtttctgactgtcagtctgacagtgggcggcaacctgaagctctgaatttcacatactagcagcccacaggatcacaatcacatgacagcaatcaaaaaagaaaaaaaaaacagaaacgcaaacgctgcacagaggcgcagggaagaactactgatgcgtgtgtcggtaggctacaacaacaagagatcaaagcgaagctagactgaatcactggacggacagggagacaggttgcccgcctctgtgcgcccctgaaccccgacaccctgcccccccccccccccctcgcaccgattcttcctcatctcctctcgctgtcccaccaacaccactgcacgtctctgcatatataaacctcatctcgttccctacttgcaactaaagtcatcgccatcatcgatcgatcgatcacaactactagaaatccagccaagaagatcgagaccggatacagctagcaatccatccaagaagatcgagagagcggatacagctagcctagctacgcgaaggatcagatcatcggcatggagctggagcttgggctggcgccaccgaattccggtcatctcgtcgtcgacgagctcagcagcagcagcagcagcggcggcggcagcggcagcgcgccggtgtctgcctcgtcggccgggaagaggggattcagggaggcgttccaggagacgctgctgctcttcgacgacggcagctgctgcaacaccagcgacgacgattgcaggaggaggaagaagacggtggtggggtggccaccggtgagctcggcgcggcgggcgtgcggcggcgccaactacgtgaaggtgaagaaggaaggcgacgccatcgggaggaaggttgatttggccctccattcctcctacgacgagctcgctgccacgctcgcccgcatgttccccaccaacgaccaccaaggtcagtagctaatttaactcaacccaattgttcatcagcacatgtgattacaaaagcaagcagaatctagtaaccgaattcgattgcgatcaatgattctgatgctaggtttggttatcgtgatatatttacaggcgagaagaaaatggccaatgatgatcatggcgatgccgctggacctgtggtcacctacgaggatggtgatggggattggatgctggttggggacgtgccatgggagtaagtcgatttcaagcttagttatttcagtgttagtataacttaatgaatcagcaagattgaacattagattctgtgtaatactgacatgttaatcctttgttttgtttgttgcagtgattttgcacgatctgtgaaacgcctgaagatactgggttaactgaactgaaggagatgcatgcgtgagttgatggagcacagctcggttttggttgcctggcatctgcgtgtgggtgtgcactgatgtatgtacatgttttcgttttcagtcaggatgttaggacgagagaaagagctttctgtcaaagactatatactgctagcttatatatactgtagttgggcacatctcatgtgtgcccagggctaggttttgagaatgtttacagagttctgtgtttttacaccttctatatgttttgcaaactgatcttgtactataatactacttttatttatttctctcttttttttcacacaccatataagctgatgacaatacttttttcttcatctgaagaaaattctgtttcaaatttccaattccaaaaccggatatatgagattgtccttccgaatcaatgtactccctccgtccaaaaaaaaagacaaaccttggtttccgtgtccaacgtttgaccgtccgtcttatttgaaaaaattatgaaaaaaatataagtcacgcataaagtattaatcatgttttatcatctaacaacaatgaaaatactaattatagttttttttataagatggacagttaaatgttggcacgaaaactcatggtttatctttttttttgggacggagggagtagacagtagactgacaaatcacaggcaactctgccctgcttgatgttctgacgggcagattgtatcgtactactcctccaggaaaaaaaatatttgtttatgtccagattcatattaaaaaatactttattttgagattgggggactagtaggatgatcaaagaaaagagagcgtggtgcattgctaagaaacaccaaaatgctcaatacttatacacggcgtggaaacaagaaagcctcggtaggcatgggttgtggagtggatcgtgggccagattgatcgtggatcgctcgctctcttcataaaccaaaaagctgggccggagaacgtcggccacctaatgggccgagagcagtgacgcgttgagccagattccggttcttacggaagtggaagagctggctgcagcccaagcccacctaccgttctggccggttcgcggtgaaacttaggcccaaggaggcggcacggtgcggtcgactttttccactcgttggatcgaatcgacggttgggatcaaactgtacccactccatttccgttgaaactaattattttcatctaaaaatatacattttatttttatctgctccactttctgtttttttttcctggtgaacgaacgcaatttcatgcgtaaagaacggcaaagaaaaattaaatttgatgcaaaacgtataattatttcacctgtaccgtacttactttcggccattattcatgtagtagtaggatacttcgaacacaaattcatacatacttcctccgtttcacaatgtaagtcgttctagcatttttcacatttatattgatgataaaattttatctagattctaaatatgagaaatgctagaatgacttacattgtgaaatggagagagtaaaaaagaaaaataattcaaaatcattggagggaaatggccaagctgtgcggtcagcgagatggcgcgaaaggcaattccatctcccgcccagctcccagaacacccgcccttttccaaatcaccaagaccaagcacccgtcatccacttctcccccactgccaggtgggcccgtactccaccatggtcccacatgtcagctgaatcttccactgcaagaagcgggaaacatttcgggtggaggcgggtttccccccaatttctccctccattttttttttcgcttcgcgtcccccaaacccctccctattaatctcccccttccccctttcttcccctcgccgccgcctcctcctcccaaaccccacaagcgaatcctagggtttctcgcctcgccgccgcatcgccgccgggaagtctccgccgccgccgcgatgttggagctgaggcttgtgcaggggagcctgctgaagaaggtgctggaggcgatccgggagctggtgacggacgccaacttcgactgctcggggacggggttctcgctgcaggccatggattccagccacgtcgccctcgtcgcgctgctcctccgctccgaggggttcgagcactaccgctgcgaccgcaacctctccatggggatgaacctcaacaacatggccaagatgctccgctgcgcgggcaacgacgacatcatcaccatcaaggccgacgatggctccgacaccgtcaccttcatgttcgagtcgcccagtgagtagtactagtctcaatcgtctcgtgccctcacgtgttcttgatttgtgtgaccttgattaatttgtgcttggatgaatagaccaagataagattgcggatttcgagatgaagctgatggacatcgacagcgagcacctcggcatccctgactccgagtaccaggccatcgtccgcatgccgtcctctgagttttccaggatctgcaaggatctgagcagcatcggagacactggtgtgtgtgattatcctcccgtggtttctgcagaacgcttgttgttaatttgtttctgtggcttgttcttaaatctttaaactgcttggcattccagttatcatctcggtgaccaaggagggtgttaagttctcgaccgctggagatattggaactgccaacattgtctgcaggcagaacaagactgttgacaaggtaattaatctatcgatggtgccttctcaaactgttactaacttggtctacgatacctgtcatgtttgtaaacttggaatgccgaaagagagtcaagaaaactacagtagcagagatggttcttttgtactcaaatattgcgctgttaacaagtaatcacgagtacagcagctagacagctaatttccttaggaaaacattacagctaattttttcatggagaacaatgtagtgtctgtactaaaagaattatttggttcagttacatgatagcatttgagctacatctgcggtcaccctagtttgcttgttaatgtttctgttatgtgtttgcaatgtgtatggtcctgggtcaataattgggttacctgtatctttaagtaactggcttgcatcagtcctatagttgtgctcattcatctggttatccagagtaaagtttgtatctaacaatttagtagtaaaactagtaaaaggagttttttttttttgctgcaagggatctgaaatcctttagtcaaattaagacatttctaagcatgaataaagtatgaatcctattaaaactagtaaaaggagtttttttttgctgcaagggatctgaaatcctttagtcaaattaagacatttctaagcatgaataaagtatgaatcctattatccccatcttgcatgtcaatatgtcatctgatcattatgctaactgcaaaactttctgttattctttccatactggagtaccggtttaggatcatgcagcaatgagtacagtaagtgataatcagtgtctaatggatgtttttttgggtcattgcagccagaagatgctacaatcatagagatgcaggaaccggtgtcactaacctttgccctgaggtacatgaactccttcaccaaggcaagcccgctctctgaacaagttacaatcagcctttcatctgagctgccagtggtggttgagtataagattgcagagatgggctacattagattttatctggcgccaaagattgaagaagatgaggaaatgaagtcgtgattgtcgcataaggatatgacaaaataccccctagtcttcagaccatcatcctttgcttaacaattgtttgtaagcaaaatgatgttatgcttatcatcgcttacgacggaatgctttttacctttgtatctgtgacttctgtaaatccttggatttacagtgatgaatgttaggtttagtagatttgtgagtttatgactgcattgctgtagcatgattgtgctgctgtttgtttgttcaattcggttgttacatatttgttgggagaggagcttcctttgggttgacactaacttcatcagtgtttggacccagaattgctatcatcctcaagctgtgaaagccaaatttccatctttgagaaggcttccaaatttccatctattttaggctctctgttgtcacctgtgataaccgataagaaacaaaacaagctatgaaaaatgattttttttaaaacagtggagacaaactatgcagcctcaattagtggccacaggcatctcacatctcccaattccggcctacattggcaatatagatttgatttgatggtattttcctatttcctaacatcggatatgttcattgttactggcagcttatagatagatctccctttacaaagcacttcacaccagagtacaatggcacaacaagatataactactgttctagaggtaaaatgctagattaggtgctgctcatgatcaccagtcaccgattttgatctgctctgcactccacaagtccaattggaaattagatcatgggtttactttgattctgccctcgaccctaactttggtgtcactggtttgcaacctgtccaagattggaagctgaatcgtcagcttataatctgaaacaattaacacctttgtcagaattctggagaacagtgtcacaaactgatttactagttttaataagtgaaatttgctctttgcatagtctaataattgcagttgcatagtctaatttgcaaaattatgttagttcttgctgtttaatctacctacagcttgaattttagggtcctttctctatttctcagaataagatagtcagaccaagaaaccttgctgctatgggacattcatttattactaaacatgttaatgaaaaaacaagataaaataggcgcacgctaatctttaggccatccaaatccagtttccttaaaatatgcttatgatcacaggaaagtattatggtgtactataaagaaataatcctatctataaggaaaatggagcctactttcattatactataaataagtggcaaaagaagcttttacctttgcaagtgtggcatatcaagtacactttctgtgtttttcggcataatgtgctgcaactggtctttgctgagtgcatatctatcaaaacgatcagcattcatcatgtatgtgttctgcctaaccgacttctcatcggttcctattgaagaagcaaagggaaggtcagtcaatgtaaaaaaatgttcaccaaaaatgcaatctgaaactactattggttattggaaatagtttatgttctctaacctggcacaattgtgctctcactagctgaagtcaggcggtgctttaacatcatctcatcaggatagatcatcttcaacataaatagatacaacaagtgaaaaatgaccatatgaagtgctattctattagcaaggaaagaggttcagtatgctgactgctgaagatcttacaagacaaaaaggattacctcagcgggttcagtgaaccgtaaggattgaagattggaacgcgaagactctacaaggaaccgaggctccagagcggttgcattaggaacacctggtaagaatagaggtttatgttggcttgccagctcaaatggaagaagtgctcctgaagtctggttcaccggctgcaaaacaactgaaggatctgatgctttggcactattctggtcaagtgcagcactcatttgcgggatcggcagatgctcaggtgccccagataagttcactgggggcagatatagaccattcctcatggacaacatctggaacaaaaattcagcaatcaaacagaaattagctgcagtaacgtggaatacatacattttgtttttcttacaaatgccgtgcaaacaacaatgtggcatgctgtgattagatcaatgttcttttctgacgtcctaaccgactaaatcttgcttagacagtaagccatcagaaaatggtgattaggatagctaatgtacactttttgatgctagaacttcaagcttgtcctaactcatatatgctagtaccatttcacttcagcacacagctgctcaatattcaaaacgcttgacatatccattgtcgatacctggagcattaagtctgtggatttgcgaaaataatcctcaagcaattcagtaacaatgcaacattcattacacttacctggacctggagctgaagctgcttcaggtactcgatggcatcgtcaagcatggaggctttgtccgtctgcatcggtgaatgaaaccatcagcacaagataaacgccaaattaactcgagagattagcttccagcaacacaagtaatagtgtgtataaatcgttgaacaaaaaatcgagtaagaaacaagagagacaattttttttactaccttgctggagttgggaatgaggctctgcagggccttcatcttctcattgattctgctcctcctcctctgcaccaaattaccgtggtcaaaatcaatcccacaaaatcagctgataccaagaggaacacgagaggtagcagtcgccgtcgccgggctaaccttctcggagaggttgtgcacctcggcggcgcggctcctcttgccgcgcggccgcgccggcctggtgggctgctccgactccgacgaccccagcgcctcctaaaaagaaccaaacaccaaatcaaaccgccaaatcaccaccagcatccgatcgaatcaaacgcggacaccgcacgccaacctcgctctcgcagcgatccagccccatgctggcgtggtgtcgcatgatcaaatccaggtgctcctcctcctggcttcctcgcccatccatcatcgcctcgccacagcaccagcaaaccacaaacactagcgctaccggacgaacgaacaaaaccaagaactccttaagtactccagaaatggcgagcgagcgccacgagaaattggacgctgctgctgctgttgctggtcatgagctgcccataccttgctgctgcagctgctgcaggagttgccacctttcttcagtttctctctctctctctctgtgtctctggttttgtgatggcttttccttgagcccgagaaagctgcaagcgcggcagagcttttgacgacgtcttttgagttttgccgctgcggctgcctctgcttcggcttcagcttctctctccggctccggcagcagcggcgcggggcggtcggtgtacggctcgtcgcgtcgcgtcgcggggtggggtggagaggttcattgatggaggagggagggaggggtggttctggttcgcgcggttttcatttatgagcgggggggtgtggtgttaatggcgtggcgtgttgagctcggctttcagagctcaacagtgccagtttccgtgggaagacatggacatggatatatgctgtgtcgtgtactcgtttactccctccgtctcgtcttattaaatttttttatgtaaatataaaaaacgaaaagttgtactttaattactttagataataaagtaagtcaaaaaaaattaataataattttaacttttttttaagaataatacgagtgatcaaacagtgcaagtaaaaactcaaaaggaagtagttgtgtgtaggcttggtacttgtgtggactctattttctccatcttaatataatataacttacacattttaatattataaatttagatagaatctctatttagatttataatagtgagagtattagattcttatattttatagtgaaagaagtaatatttactactacgtaaaataagacggtgaattatcacattattaattagataatttgaaaataaattaagatattcttttataacaactttcatatagtagtcttttataaaaacaaactctacgaatctggacatatagatttgattgggtttttttttgactgaggggtatatcgtttaacaattttaaaaacgtgaacacaaaacacgataaatagaagttacttcattcgccctaaaacattttagaatgtgccatcaatttaaaatctcttatattttatattttagaatggaggaagtatagaagaggagaaaataccgcaccatgggagggactagtagtctagtacagttggcactgtgctcgctttactccggtacagtgtttgcgccggctcctttcgggatcagtcagttcgtcgccgcacggatgagcgtgagctgcttgctgatgctgttccagcctcgcgtgctcatcaggaggagcagcatatcggtcttgctgttgccgtgtcaatgacgtgaccttaactgcagcattagcgaatgttgacaacagtatcaagaagaggcaccaacgggacaaaaaatggtccctctgaaatctctcatggcacacgggttcctctaggatttgatctggaccgttcatccgtcatcggacggcccacgattggacatgatcggattgactgtatctgattgagcaacttcatcgttcccattaacacatttcttaaactatttaattatacatttcgtgtaaaaaacttaggtcctatttagttcccaaaacaaaaatttttacactatcacatttaaacacatatatagagtattaaatgtagacaaaaaattaaaaccaattatacaaattgcgtgtaaattgcgagacgaattttttaagcttaattgtggcatgatttgacaatatggtgctacaataaatatttgataatgacggattaattagacttaataaattcgtctcgaagtttcctggcgaaatctgtaatttgttttgttattagactacgtttaatacttcaaatgtgtatccgtatattcgatatgacaatcaaacctaaaaattttccccaactaaacaagacctttatatatatacatatttttcaaaaagtaagaatttttttttgcatgtttaaaatactcggcgtggcaacgacgccgtccagcttggagtagagcgccgcggccattctcagcgcctccagcttctttgaagggaagccctcgaacctggcaagcaccagcaatggaagccagtcaggccggccggccggcacgcgccgcgcatgcgcggcgccatggcagagcagccgagctcgaggggagtgagctggtttgtagtgcgcgcccggacgaacacctgcgtctcgtcggtcaggcacgcgagctgcagtggaacctcgccagctcgcccatgtccatggattggaacgcgccgacggcgtctttcagctccaggatcgccgccgggtgggttccgacgtcctcctcgatttgccggaagtaggccgatctttccgttccaatattgtcgtagcaagcgaagattaccacaagaatctcgaggtcatgatcaatgtcaatggtgtttgcggtgcgtgcacgtacctcttggtcatctcggccgatgcgtcggccatgccatgacctgcaccaccgcccttggcgccggccgccggcgacgcccgggctttcttgtcgcgcgagctcttgccgccatgcaggtgagaagcgccgccttctactagatcggtcacgcagatgccggtacatgctccccatctctgccgatcgcttcagcttcgtcgcggatttctttgcgcgcagcgctaacctcagaataaaattacagctttggtttccttctgatctggatgttgacaacattaacaaggttagatgaaagtacataccaaattgttcaaagctctggctcaggtggtgtttggatccaaggacttaactttagtctctttatttatacactaatttagggtattaattatatactacttacaaaactaattatatactacttacaaaactaattacataaatgaaagctaatttgcgaggcaaattttttaaacctaattaatccataattagagaatgtttactgtagcatcacataggctaatcatggattaattaggctcaatagattcgtctcgcgaattagtccaagattatggattggttttattaatagtctacgtttaatatttataattagtgtccaaacatccgatgtgatagcgacttaaaagttttagtcccatctaaacagggtctcactgtggctgtaaacttatcagatcctaagtttcccatttgtctgtgctgtgcatgacagtcttgaaccaactctgagaacctcatggaggtgaactagaccctccttgttctgtactgacattagctaatgcctaatgcagaagatgtgctaagaaatcattgataaattcagaaagttgacatgcttttctgaacagctttgcacaggatgatttgcgtgtattgtcaagacatcgacagatatacaatattacttgaagtaattgacctgctgtacatacagaggaagtattgtggtatgcagataagcctgataaacatttcgggtatgcgatcttcagcgcttcttgggtatccaaaagcaactgaattgatttgaaaaggcaaatgtaaatcgatctggccatgaaacttgcgcaaaaaaagtttgatacaatttgaattctagtttggcatgtacctgatccaacgcaatgtatgaccttcggcatagcagatctagagcatctatcagatggaggatcttgttaatgatgcttgctgacaacagggactggtttggtaatggatcactagcaggattgcagtttccaccaccctcaacaatagttgtcagtaatgccaggccttcatgtctgttgaaaacgcctgaagcctcctgcaaattctggttatgaggtgcaaattgtcatgctttaggccgattttgttggtgtggccgaattttgtgtgtgataagcaagggggccgccaagaggattcagcaatgcttctcctcaaggcatgatgatcctcagagaaagaggatggccccatcggtacaaggacaatctacaatgatatatgcagagaaagggagaagggatcaaagcatctgatggaaaatggctaagatttaatgaatcagaaacagaaagatggaaatggaagaggtttataattagcatagtagtttcttgaggcagccagtgttggctaaaattaagtatccaagctaaaaagcagctaatccatgaggacatgtggttatatgtttgtgtggagggtaacccacggtaaataccaatgctttttcccaagaagtggatatggtcacacagacacatttttgtcttaagttgttcataccatgggttctgaaatctgaataatgaacagcaattccatcaagaactgacaaaaactggttatcaaaggatcttctcttatgcagcactgaatctaagaacaatcttgacctagcctggcttgggtgagtacaaaaacagagatggagcaccagttcctggttcattcgagaagaagacaaactgaaaggcaagcaggctgacagatccatggcacatccggagttcccaataaacacctcgatgtgcatcacatcgatcgctccgcccggccaaaaaacaaatggaaaacagaacaaaatcggtctataaattggctactacgtcctcattgcaagactcccccggccaatccattggtagaacacaagaaccgcttgatgagtagtagcacaagaacacaagaagcaaccaggtagcaggagaaggagaggtgagattaccttaccttggtgagaatccatggggtcacttgatggcgacgctgccacctcgccgtccttctccagcaccgggagcagcggcgacggcaacggcggcggcggcggcggcggtagggtcgggatatacgcgtgcttcgcgcttggcgggtcgaacagcctcgagtgctacgagcccggggccaacacgtggcgccgcgtgggcgagctccccggcgtccccgacggccacgtgctgaagggcttcgccgtcgtcgcgctcggcgacttcgtctacgtcatcggcggccggctgtgccggagggagcgcggcggcggcggcgagtaccgcgacaccgacgtcgacgtgcgcggcgacgtggtccggtacgacgcgcgccgcggggagtgggggcggtgcgcgccgctcctcgtcccgcgcttcgacttcgcgtgcgcgccgtgcggcgggaagatctgcgtcgccggcgggcagcgctcgctgtccggcgcccgtggcacggcggcggcggaggtgttcgacgccgacaagggcgggtggtcgcggctccccgacatgagcacgcggcggtacaagtgcgtcggggtgacgtggcacggccgcttccacgtcgtgggggggttcgcggagagcacgtcgtcgtcgtcgccggccgccgccgccgacgacgaggcggcggcggcgccgccggggagggccaccgcgctgctgctgctgctgccgcagtcgtcggcgctggagcggagctcggcggaggtgttcgactgcgcgaggggcgtgtgggagatcatcccggggatgtggcagctcgacgtgccgccgaaccagatcgtggcggtggccggccggctgctcagctccggcgactgcctcaacagctggaagggccacgtcgaggtgtacgacggcgagctcaacatctggagcatcatggaccactcggcgatgccggacatgccgctgctcgccgccctcccgccgtcggcgcagcggcggtaccacaccatggccgtcgtcggcaatcagctctacttcctcgccggctaccaggtggcggcgggcggcgacggcggcttcaggaccgtctccctggtgcacagcttcgacaccagtgcaaaccccgggctgatgccgccatggagaagcttccagcccaccatggatcaggatggcgtggaagacggcagcaaggaattgttcagccagtgctgctccgtgcagctctagttgcagaattacactacacaagaccaaagtctacacagtataatgtatcatagttttgatcacagcaccatactctgtatctcatctgaatgtgtgtgacccataaagatggtctcatctttgctgaaaaatggatcagtgtaattgattgcaagtatctgaaatatgggaaatgaaatcatagaaaagaaggcataatataggggtaaagcgtggcagagaatacatcatgtaatcatcattcaatcagttaatcaaaggttcagttatttcaggtgccaacaagttgcagatgagtaacttaatcaagttgtgaccttcaggagcttacgccgacaacttcacatgcagaaacggcgagaagagatacaagaactaactgaatcagctaataatatgccaatctcgtctcacaacttgcttattgaacaacaggatataccgtattacgtgctgcagtattacctttcgtgttcgtaaatcgaactgaaatgaacacatactaattctgcaacctagaaatagctgattttcccgtaggagactatcagagaataagatggctgaacagatttcaaccagagggcacaacagcaattctttgtaaaactcacctttgcattctatgaccgacattggtccaaccaactgtaatcatccgtactatttgcattacagtgttgatgagttccagcttgcatcgacagcacccacaattctgtgatgaagcaatggtccggaacaggctattatgcctctatccaagccctctaagaaaacacccctggagaagtcgagtgggcggcccccagcatctgtgatcactccgccagcttctcgaatgataaccaccccagcggcatgatcccatatcttctccttgtatccagctctagcgaatttcatgaatatttctacatcccctcgtgctattgcggcatatttcaccatgctgtacacacgcaggggttgcttcctggaatccaagcaaaacatataaatataacagtacgataaatccaaaacttgcaaattacatgctacaatagatggaaacggacaactgtcaaatgaaggtgccatttaattttatactgatgcagaaccagcatcctattcaggaaacagtttcaaaagaagtatactattcgggaaagatcaggcaatggtttgcagatatggcatgtaaatgtatagagtagttttggctgtagttacacaatattagcatccataaaggttatgcataccgcgcagacattaaactcaagaactgaccttaagcctacactatgagcaagtccagcagtgaaggaatgacttgtattagctttctcaacgggttcacagaatgttgctgagattggatcactaacagttgatactcggacctctcttgaattacgccaatcaagcttgccaaagtcatgaactaatggttgcatccaagcttggccacatcctcggtgagcatacatcacacaacccttatgccaggatcctgatgtgggaggagaaaccttagacatcaacctgtaatatcgttggtggtagttgagccactccttcttcattggataatttgggcacccaagaactcccaatacaacttccccatcttcaattagcgcgagagcaacagcgtattggtccccacgtacaaacccaagcgtgccatccacaggatcaagcacccaaaaccttccttttggacctccgatagagctgcacctcctaatagcttgaagaatatcatgagctttgagctctttctctggggacctcagcccatacttcggagcttcaatcaagcaaccattgacagcagcaacgacagattcaagcaaagctgcaccatcgctactagatagcgtctcatcatcttcttcggctactatagatatgttttcatcttgaaagcaatccgagagtagccagcttactatcgcttggacgccccaatctggaataacgtttgaaggaaagattactactggtaaccaattaccacaaaagcataaatttattgcatccaaaagataccaaccacaaagtcacaattcttgatggcatttaacacaaagatcttcttaaatttgtgggccaaataacattgcatcagatcagatttgatttgacatatgaccatgtggtattatgagctatctggtatctggtatgttggcaacatggagcatgagctacccactaccattgtactcatactgaacctggtagtggaccattattatttagtagtgttctaacaggccaacaagtcaagtgcaagtattcaattctcttccttaggaaatcacagaacataagagtataagaccactacgcacacggtcgctcaatttcaaagtcaacaacaataactaattaagcaaccattccatttaggaattcggactgaattaagaacaatgaatcagtatcaatctgaatattctaatatgatggagctccagtttgactaatctctcgctatggattttggaggcatactaaattgcggcgacgaactgaccagtgctacgagctcgctcaggagtgaaggcaacaagaccaacctgcgacggtgacgggggagcggtcgatcttggagtggacgctgccggaggcggaggcggaggcggggaggaggagcgagctctgcacgcgctggcagagggtgcaggcggcctgcacgacgcgcaccgcgacctccatctccctagcgtagtccctcccgcccccgccgatgccgcggcaatcccacagccagtcgtgctccgcggtcccgacccggggtgacccgcccgccgcgaggtgggacggcgccgccgccgccgagggcgcgggcgtggacgacggggcgctgcagcggcggcggacgaccggcgcccctcggcgggggcggcgcccgtcccagtccgacggcgacggcggcgcggccgccgcccaggtggggaggcggaggccgctgcatcccatggcggtgaagcccgaagccctcgtcgtcgtcgtcggcggcggcggcggcgatggattggtggatgaatcgatccggtggttgcgagatgctcctcctcttctgctgcttcttcttcgtgttccacttttttggttagccggcaacggtggcgaaggagagcgcgcgtgcgggtgaagcccccgcaccgtgggaatccatctcaatctggaaagctttctttgcaacacttctcatttctagtgcgcacgttattccttatttttccgtgcacatgttttttaaattttgaaataatatattttttttaaaaaatatttcttaaaaagatatattaaatttaccttaaatatatcttttactaatatttaattaattatggattagtgatcatttcgttttacgtacaaaatatccgtctcatctataaagaacacagtctttttcactttcatttcttttcttttctttcgccttgctgagttgctatcgcccattagtagtactagtactatgtcccacacgagcatgacatgatttgccgccactcaactgatatttttgtcatggttactggttgattctcttccaactgtatagtacttctgatgccttaaataacgcgtagcttaacaaagaagataaaaacaattcttctgcaataccaaacaaaacaagatgaggtatagtaactagtcatactaaaagcaaaacaagattaggtatagtagttcgttacactaaaatacaattaaaattgacaacctcataaatatgcatggaatatcattaagtagccatcaatccatgtgttgcacgagtttgtaactttatatcatcactagagaattatccagtctttttttttctttttttgggatgtttgcacggagtacaagcaaaatttgatgatttaacactctattcgttgccactcgagacgatgactgaatatgttagttgttgtacatattggttacatcatgcaagtctttaatttgaaattaaaataaaaagttaaaactaaattgagagcataggatgtatagacttcgtattcataattctaacattaaaattattaaaataataaaatacaattaataagtccatagtttttataaattgcattattattgacacacaaactttaaactactatttacggtaggtcatatcaacctgatgtatgaacatttttctggtgaatgtaagagttaattagggcagatacaaagacaattaataaacagacttttaagttgctgacatataagagaaatgaaaaaaaaagagagaaatatacttgttaaatgtgacaatggtcgtcgactctaggcgtttatagaggaaaactttagtatatatggatagagaaaaaaaaagaaagacatgtggtagaaaaaaaattgtgcattaattagtatagtcatttgtcctctcaaatgttgtaagagaatagcattttaatggaagtctatatcaggccatacctcagaaggtatccgttttagtacaagtatgatccaccaaattaatgattatatctttttaattaatgtgagagtattctccaaatgttcaattacacagatatatagactttctattctccagtcaataccaactcgccccgaatcgattcattttcaaaatatatagacaatgtagcaaacaacgtttataccgtattactcccttcttttcattcatattatttattatttagttgtttgactttttttcatagttaaaccttttaaagtataattaaatttatataaaaatatagtagtattttcaacacaaaacaaacaaattatcaaaatatattcaatgttagattcaataaaactattttaatatgttagtaatatttttctataaacttgatcaatcaaaacaaagtttgaatgaaaaaaagttaaacggcttaaaatatgaaacggaaggactagcacttaggaagtacttatctttttttagaaggctggaccagatttcagctatctgggccaattttactcaaccaggcccaaggcccatctcaatatccagtcgacgagtcagcagcagagacgcagagtgtcagcgcgtgcgtggactcatcgagaggagcaaagcaaagcgagcagctgagccccgacgaggtagggggagagatgagggcggtggtgatcgcgcgcgccggcgggccggaggtgctggaggagcgggacgtcggggagggcctcccgccgccgggggaaggcgaggtgctcgtcggggtgtccgccgccggcgtcaaccgcgccgacaccgtccagcgccagggccggtaccccgcgccgcccggcgcgtccccttacccgggcctcgagtgctccggcaccatcctcgccctcggccctaacgtcccctcccgctgggccgtcggtgaccaggtgaatcggtgattgccgccgccgccgctgccgtttggattaggacgttaggttagggggtgtttagatctagggtttaaagttttagcgtgttacatcggatattatatagggtgtcacatgaggtgtttaggcactaataaaaaaattaattacaaaatccgtcgcactaataaaaaaactaattacagaatccgtcggtagactgcgagacgaatttattaagcctaatgaatccatcattagcaaatgtttacggtagtaccacattgtcaaatcatggagaaattagactcaaaagatttgtctcgcaaattagtcgtaatctatgtaattagttattcttttagcatatatttaatacttcatgcagatgttcaaacgttctatgtgataggatgtaaaattttgggagatttgtttttccccttgcaggtgtgcgcgctgctcagcagcggcgggtatgcggagaaggtggtggtgccggcggggcagctgctcccggtgccggagggggtgtctctgacggacgccgccggcttgcccgaggtggcctgcaccgtctggtcgaccgtcttcgtgaccagccacctctcccccagcgaatcgttcctcgtaagataacttctctccttttcaatcccccattgactccatgattcattcctgagcacggtgcatccttggtgtttgcagatccatggtggatcgagtggaattggtacatttgctatacagattgcaaagcaccttggaattaaggtttttgttactgcaggtttgtttatagtagaacaagaatagatacagtagggagtatataataggatgttgcagagatcgctcaagtaaatgctgttacactatgtgtttgtaggtagtgaggaaaaactagctgcctgcaaaggtttgggtgccgatgtatgcataaactacaaaactgaagatttcgttgcacgtgtcaaagaagaaacaaatggaaagggtatatcgcacgcgttcaccatttttgtgtgttcatgttcatattattttccccagccaattggtacttatatgcagatggatttcttataacggcatttctccatggaactgtctataatgtttgatacctgccaagtttgcatatgctttagtgactcttgacatggaagtatatttaccaggtgttgatgtcattctggacaacatcggtggattgtatcttcagcgtaacctgaacagcttagctgttgatggtagacttttcatcattggtttccaaggaggcgctgtaactgaagtgaacctgcaacccatgcttgctcgacgattgaccatacaaggtaacgttgatctataggcaacaatgtccctcatactagatttttgtgtttctagttttgttatttacgatcttataccactgctggttgttgccttactgagaatcacaattatgtgattggatgatacctaaacgatatcgctgattttagcatgtgtggaaatggtatgattctgtgcagctgctggactacgcaacagaagccttgataataaagctctgattgtcagtgaggtggagaaaaatgtatggcctgccgttgtgcaaggcaaggtgaaaccagtaatatacaagacgtttcctctgtcagaagctgctgaagctcacaagttgatggaagaaagttcccacattggcaagatactattgattccatgaatgtattggtatcttgtttgtgctctcactatcggagccactttaaacactgtatatttggtttgtcctttgatcttgcatgttgacaagagtggacgtactatgtcagaaaattatgtgtcacaatacatgaagaaagttatgtactcatgctctctcaaccaacggatcatttggatataaatgcgattgcttggtttggagtccctggcattggtgttattcatgatgatgacactagagtagatttttaaaaggcatgattagcaccaaatgatgatgcatgatgtttatataatgcaagtactttttttttggatggatctatattgctacttcaagaaatttgaatatatgtatgcacaacttgatgtcatgatggtgcagctagtagatgtttaagaaacatgattagcatcaaatgatgatgcatgatgttttcataatgttacttcagacatttgaatatattactgcaccacttgatgtcaacgcatggccaaatgtgggcacggaccaaacaagaaaggaactggatatggccattaagacaacgtatatttacaaataccaaacagccttgtaagggccagtcaaggataacttataactgaatacaccactcaaatgaaccaaaaatcttctatttgcactggtagtttgctagtcaggagcaaccacttcaaaatggcatgtgtaaaactcactaacaattgcaagcaaagtaatattcttgctacagtagctatttctcctacttcatacttcaccactctactaggcctcccgctagttcatatgtcaaattttaaggaagatgaatgctaaactacaaaagaagtatgtagtaatgtcattattcttgtgtaaggttcgatgtaacagtgcaattgcattgctgtttcatgatctgaatctgcctcttcaacacctcattatcctgcagttgtgaaaacgagcatctcaaaagagttgaaaaaaaatgagcataagcatggtaacacctaagagagtgaaatatatggagaaaccaggagaaagcgctcaatattactgaggaagcatagagctaatattatgttagggtgttacaacgagaagcatcaaagtttgcccccaaaaggttacctttttcaataggctaaatctcttagttgaagcagagagtgaggccttagcctgtaaacaagattctcaaatgagcactgcagaaggaaactgaggaaagctgtgtacaagtacataatataaatagaccagacctttaaaagttcatcttgcatctgtttgtttttcgcaaactctgtgtcatatttcattctccattcagcagattcatccattgcttctaggttggcacgctcaaattgcctcctgcaaaagattgatgcagaaaaaaaagtgcaattgaaactatcagtcagcctcgaacaaattggacaggcatgggttgatatttcacagcccaaccgttttgcttatgtttatgctaataacattttgaattttaaaactcaattttgtgggttttctatcatagtttatttacaaaataacaactaaagacacgtatataaaagttttatccataaattattttttgggttactaataagctgtatagattttaagtaaaaaaaagtcgtaagcataagcataagcgaaaagatggggctgtcaagctaccaatgtggaaggagaatgaggaccgggtaacagcttaacctatgccagccaggagtattttggcaagaacacatttcagtcaaaaagggcagagacatattgacacttgacaggaaacaaaaatagaagacaaaagcctccagaaacttccccttgataaacctacgagcaatggcagtttcgcactttttagttatcaaagcatctagggtgaatggttaattgcagatagacaataacagtaaaaaaaaccattctacgttaggaactcctttttgtctctgcgttaccactaagcagggacaagccatttcaggagctgatctcatccctatcatggaagataagaatgcaattcacagggccgtgacaatgatgccacaaggtctaaatgactaaatcgaaggtttagccagtgccaaacgcccaacaagcaccaatttcccctgtcaattcgtatttcaaaagcaaggcgtccatgaattcccagccacggatccatttcaccaaacaacaacaggtttcctccgttttttagctcgaccgagagatccttatgtccaattcgcaagagtaaaatgaagaggagaggaaggaggacgaaccggagctcctcgcggtcgtcgacggtgaaggaggggtcggtggactggcgcgcccagatgcggaagtagacggcggtgcccatcagcagcgccaccgcgaacgccaccatcagcgcccgcctctcctgcttccgccccgcccctccccatcctcctccccctcctcctcctcctcttccccccaccatccccctccgcttcctcctccctcccgctctggatcacacggacacacacacacagctccacctgctctctctgtcaggtcaggtcacaaggcgcatcagctgcttctgtctcgtcgaccggtacacgacgctcgcacggcccatttatcggcccaattggctaaggcccagtttctacggttactttctctaccgaactattataaactgtgtgcgcgcgcgcgttttaaaaaaaattccacatacaagttttttttaaaaacaaataaatatatgggttttaaatttatattatttaatacttaactaatcatgtgttaattagacttttcgctttgtgtgcaaatgtttagcctgtacacgatctcagccttcagtcgttacgagttagtaagctttttcgctcctttgcgacacgatgacaagaattttacagtactttcacaaaaatcagtttaattcccacaaaattcccttttcaaaggaagcctgtaatagtagaagacaaatttacggagaactagccatggagaactctgatcgagctactgtcagctacaggatggctgattctgctcctgaaaacgtttatatacagctacgggatacccagtaaaaaagttacttcatgcaccaaggcatagttgctgctcttcatatgctctgaatctgaactagccgcggcggaggcacaggcggtggtaatgtagacagaaattcctccgacaagacgacgatgaaacggtgaacgccaattgcagcggagaccaccgagatagcaaacatgttccagctcactctgaccatcaggatggggtcctctcttatgtccctgacgaacttggagaatatcaccttcagcctgcgatctcttactgctgtctggaatgtcaccaaggctggtgcttctttggacagccccaggtcttcatcgttctttcctgctgtcacgcgtgggtgaggctcgagctgtccggctcgtttaaaaccagttgccttcaccatccactggaagatgacatcggcaagtacccgacttaagagcacccggtaaatcgatgcatctttggagatcaggtcacgagcaagtgacttcgcgttctgtgcaacaggaagtatggtgagctcagttgatttctagtttagtgtgttttatgcgttcagaaatccagccaaaagggccagtcgattcaggtaaagaggggaaacaaggaaaagtacataccgctgtcattacaagtctccttatcacaatgctctccttcgatagtaaaagccgcaagcacagatttgcagtatgtagtgctctttctggtgtagcacggttaagatggagtgaagaagatgcatcactgatctctacaagttttgcaacatccaaacccttcctctcaggcaaaacgccagtattatacctgaagttaccccttcacatacgaaaacatcatcagatgcatctcgtgaaaactaagcaagtaagcatcatagtagaagaaattctgttcatacagtttagtgaaaaaaacatgatgtttacacacaattctgctcagaactagagaactgaccttgctgatgctaattttagaaatactgtaatcttgttccactgaaactctttccttttgttgaaaatagcctgtgtattaataattggtgtcagaactctattatcatcgatgccatttcccttgggtgtttgacgtttgatatcgtgaactaacaaaactcagaatttcaaattttattgcaggatttctgtacatctcgtacaaacgaaaatgggtgagttgactgtttcaaagagcacatattgtccaggttgcacaaaatataagaaaagtgaatcaattaattaaatcaacttaacatatatactatacaggtaaacaaatgaggtaaaataataatacctgatgcaagagtctccttgttgcaactgaattatccgatagaagcttccgcacaacatatggatatgctgcttgaaatgttttaaaagttccatctgctgcaatggccagccctacagattacacaaaaggggacgctggtaagcctccaaaaaaaaacacatgctcaaatatgtacaagtcagaaacaaaaaagcaacacatacttataattgagctagttcagtactgaatttcatctaaacaaactaaccttccaaagaggcaagtgacctcaggacgagcgtgtagtacggcggcatacggaagtggtatttaaatgccacagaccatatttttccaagcacctaaaggatgtttttaacagttcaggaagatgccgataaagagagagacatgccgcagtttataactgaacttaaagagggaaagctacacaccctgctaaacttgatatctggaattccatcttcaaaggtcacctcacccaacgcatcctccaagtcctaccaatcaacaaacattaaaaataataatggaataacaaactaaataacactacaagctccctttccagatttgtaaaactaggatgtgtcccatccatccaaaatcccttatattttgggacggagggagtatgagataagaacctttgtttttttccatcttgtaataaccataaataaataaatattctgcattttgatgaattaccattgtcactcggcgtagattagttcttggtggaacaacatccattgcagtcaaatcataaacaagagaagcccaatctccatttactatgtgaacgatacttgcaagcatagcatgctgatgtttcttctccatcatacaaagcaaaccaaaatcaagaaacctaacataattaggaaggtgttactattgctcaaagggagaatgacagaggaaaaccattacaaaaacatcagacccactgtataacatgattctgctgattatagtaagaagacattttcttatagagcgtacataaaaagataaattaacactaacccgacacgaccttcaggtgtataacgcaaattcccaggatgaggatcagcatgcaacaaaccagtctcgaggagctgcactaatgatgcttcgacacctttgttgaccttatcatcatagtaattaacaagatgttaaaacattttgtccagaggggaaaaatgtttattgaaatgtagtaattgttgttataatgtttatatttctaccacagcagagagaaaagaacatcaatattgaagtgatagatatttataaaattaagctgcgtgtttctgaaacaaacacaatattgcaaagaaccatgtaaactgcagtttctaactgacaaaaaagccctattcactgagcacgacttcaattccaaatatttgctacccgggagcactgattgttgtggattaatttatttatggtgctcatctttttacaaatgaagcagataatttagaaataacttgtgacgaacataaataccaggtcaagaagacgggctgttgcttcgatcttctgcttctctgacgattcagcaatttctgatgaaattcctttagataaggaaagcaaatctgtgggattttcaccagatacccactccattgtcaaaactcttctcctcgtaagttgcttgagaacctttggaaccagcataaatgaatatctggaatgatattcctacagaagtacaaattatgagataaaacgccaaaacaggaataggcatatgttagtaaagtataggtaggagacaagaccaaagcaccaggaatttggtagcattagcagcttcaatattgtagtccaactcgccaaccaaacctttacccaactcatcagcatagagggcaatgttgcttttcctctttgctaccttcctcacaaaagaaagctgaaacatatatggtagaaaagacatcaagttgctaggactatagtggaaaaatgctgcaatgctataattttgtaagcaaaataaagaaataaaatgaagtgcaagaacatttaatctaaatacagataaacttaaatgagacaaggtccatctgtattgaaagaaagtactgtacaatgtttcttgtgtcagcacaggttatcatagtcacattaacactcttaattaaacacaaaatcagggaaacggtaaagcttgtttagggacaacaaaatagaaggcatcaggtattatgctcatgctgaggatcagaagatgaactttcttttttgtcaaacagtaggcgaagaacctatggtgtatatatcttctatgaacaagatgtgggcattagcacttggcagaattaaaaacactcaaaaacagatgagcttatatatttaatggagatatagttgcatacgtaccccaagccgtagaatataaatgtccctcaatactgaaggaagaaggttaggccgttgaacctttatggccacaagagcaccatcaactgtacgtccctgataaacctaaagtacaacaaacaagagtacactgagcataacagaaaaattgaaagagatagtacagaaaaatataataaggcttaatcagaaactacaaagctcctgtctctaatatttaaaaaagaacgggaaaagttttgcaagatatgattacctgtccaaaggaagctgcagcaacaggctcatcagaaatgtaactgaaaatgtgtgatacagggagctcaaattctccctcaataatcttcattgcatcttttctcgggaagggaggaaccttttcatgtaactcggcgagtgcctatgattggggtgtgcgccagttaattttgagaaagactatggagattgtttaatgatcaacaaaacacttctgaagatgatgaagcaattaaagaaatgcagaaatgttattgtatcctgcagtaattttacctaacctcagaaatctccgagcctgtgatatcaggccttgttgagagggactgtccaactgcacacagaagacaagcaagtcaacattaatccgaaccgagtggccactaccatggcttaaagctatcgaacctgaaaacctgacctttaacaaaagtaggcccaagatctagaaatgtctctttgagaagctggccaaccatgtattgtgaagcattgaaacctttgcttccggtgctattacagctgtaggtggcatctgtgatcaagtttgttcttttagaaatttgcatctttactgcagccgagacaaatgcgaagattatctacagatacagaagcatggcacactgaactattagatttatcagttgaagcttagtaagagcaaagatgaacagtaattacagcttttacctgaatggtgcgaaatgcgagaatatgaggacgcgaggtgaagtaacgggacagtatctccggatcgtaatgctggggtagaggagtggtgagaatggctacatagtagttgatgtacaacttgagagcttcgatatcagccatcatcagctccatacaagacagccctagcaaaaatcataaaacaagttaataatgcaatcgatgaaacttaaatgattaagcaacagctaattgggcactgcttggtgtaagcaacctggagggtacgatgggggagggaaggccggaggttgaagtgtctgattctgctgctcttgttgctgctgcttcttcttctgctgctgctgctgttgctggagttttggtttaggagtttgctgatgctgaggttgccgcttgcctttgagaaattgctgctcgattgcatgcttcgagtagccgatatacagcttcagggcttcgaaatcagcagtcataagatccaggcatgataatcctaccaattgggagaatccccatcagcaacaggaacaatgcgtgcgcaacggagcccaatcgagatgcttctctgccgcgcggcgacaaacctggctggtaggagggaggtgggaaggatggggcttggatagccgccgccgcttcctcttgctgctgctgctgctccggaggtttgggtttaggttttggttgcttccgccgccgctgctgcttcttcttctcgaggaagcggagccagaagatgtcgcggaggggggcgccggctgccgcctggaggaactcgccgtcgcggcggagcactccgagcacctggtccagcgcccctcctcctcctcctcggccaccattcccgcccggctgccgccgcggctggtgcggcaatctctgcttgttcccgccccaccacgaccgctgctgcggcggcgaccgcttgtcgttaccgccgccgcccgtcatggcgcagacgggcagcacggcgggccgcacgagcgccgccatggcatcggctcggctccagattccagaagcttctagcagcagcaggagagcgcgcgagcactagcagcggtggtggtggtacagcgaaagcgtgaaggagaagatgcctggccacacgctccgcacacgtcatcggcgcatcactcgtctccacagatagcaaaagaacaaagcccattcagcttcgcttgtcgccaaggcccacggcccatcactacaaatggttggatcggcccaaactccgtactcaaaaggctaggcccatcataattctacacattcgggccatgcacagcccgctacattgtctaaggaaggatgcttatcagttctcagttctcaaccacaatgtaagaataacggaacaagatcatgcaaaatgcagaggaattcttactccattttgagcaacatttcaaacacaaatctgaatggacagaagaaaaaacattcatgtgcacgaaatgtagggatattatcacaatggtagaagcatctgttgcattcaggattacagatacaactagaaaagtgaagaaaaagctgagttaacaacagaagacacgcccttggcttacatagtctatacacatcaagcatacacacatggggtgatgctttgtcaggctcctaggtacgtaggaaggaagcttccatggactgcaggatactcgctgtgtcgaacctgaagtttcggaagcttttacctgggcggctgtcaagagtttgtgggtcagatcctgttctagtaataacggggttctcaacaggcgccgctccagttgaggaattcttcgctttccacacagtacctgtcaaatgatgtgtggtaccatagatgttatcacaattatagaggcaaacggtatatgtagcaccagaggttcaccaattttatcacaaattacatactaggagtacattgcaccaggttcaccaatggtactacacacactatgtactaaaagttgatcataagtatagccatgagttcatgactatgccaggatcagacctgctttaattatgtactagctgatattttgctcagttgagaactacttctgcagattaacttagaaaacaacaagcgaaacttgaagcagaactgctaaaaataattgacaaataatttaacatttttaggtcctaacataaatgggcaaagggaggatcagaagaaacctctagcagacgtgtctgatttctgatactgtgggtgacgatgtgtggctatccaggcttttagacccctggatgaagaagtaaaatgtaaaggaattaaacaatgtagaaacaaattcacactcaggaaatgtggatgcgggttaaatattttagaagccattaaaccaacatgctcatgatgactgtctgcaccaagaaaaaaaaactaaagtgggtcaaaaaggtactgactgcaaaaatggtgcgaccatatagagcttcatcccattcactccacgagatattgcgtcatcaccagcaggaaggagttcatcgatgttgtgccatgagatctcctgtcaatttcagaggatcacgactcagtaatgcctatttaactctctttaaccaaagagaggttcaaaactcaaaagggtcaatggataaactacaacgaaaaaaacaataaattgtagttacagtaactacagtcttcaagtagacacaaggtagtaaacacaaccacacaagacagctagcattgcaagtgattcatacaccagcataaaaagataaagtacctcagtcagcaagcaaaaatatgtggctgaacatgtactaacttgtcagttaagtaacaataaagtgattacagaatgcttcaaattgagtctcttctcaactgagttgaaatttagcagatcattatggaaaaaaaaatctgtagaacagcttgttaatcggaaaggagctattccttactataagctaagcacacacgaaggattatggccattaatcaaacaatcaaagtcatattgtatcattttgcaatcatgtcacgcaattccccttttcgttttcagatagcgagtccaaaatattctgaatgtagttgagcaaaaagaaatatgataaaaacactgaacatttgcgtacactgatctccttcttagtttgaggcgcaaaaacagtatcccccttaacaccagttataatataaaggcggactctttgctgccacattgaaacttcaatataatcttccaattttaaaagcttcgaaacatcacacccagtttcctctagaacctgcattgttatgtaaataaatgtcacttacatagactagtaatgcaataagcaaagggaagtgcaaaacatggaaactagttcacgaaagctaagacgtgatcactgcatgtctttaaaaaaaattatgcacaggaccagctgacaatatttagctaaccaatgctaagctttttttgttcctttttaaacatgagataggcaatgcaattcatttttagagaagaaacaacaaatggtgtatgcaatggattaaaatgcaaacactaaatgaaaacagtaagtgttggagcatggtagaatatctagaactttgatatttgaattgtagaaaaaagcatcttgatgatctagagaaatgtaaaactattgttcagtgacttatacaaatttctatcctttataagtctaatttaattgataaaactgcaaagaacaacatcgattcagcccagaagtttacttctctaacagcacatgtatgatcttcttcatctttactcctctttccacgaggaaaactccagctggcgctagacttccatcccttcacaagcaagcactgcacagaaggagaaaaagtgaatgaaacttggggtgtgagtatgtgatgacaaagtgaaaaagaatgcgcgaattgaggtctacaagggttaaagatccaaagatgtaatttttatttgtgcctagtgcattgcagtatagagcttgaaactatacgcattgaagcgactatacaataaaccatctacaaggtatttgcagcaacagacaaaataccagaattactttagcattgtttccaagctgccacacccacacattgtgcaacataagcagctactcagctaaacttaatctaggtagaaagtaatatggtacaaggtgatcggggtaggggtgtagttaccttctcgtaggtgtcatcgaggatgatggcgccgcagacagggacacggaacttatagtgagtgaaatccttgtaaatgtcatcaaggtgcgcgcggtatggcctgagcgcagcacagctattgaacactgcacacatacaccaccacaacaacaataacggtgtcagcgatcaaaccaacggcggaagcgccaccgatgaatccaaggtggagttcggccggagcttactgagcgtagtgaagtccttgaaggagagcgacttgagggaggggttgtgctcgacggagttgtcctcgtagaaccagtgcgcctgctccagcaagaacaggatccgctcgaacgactccaaatcctccttgggcacgttgagcacgaagcggctgcgatttttccgtttccaccggcgattcgattcagtttttttccggggggtttgatctgagcaaaagccgagaagaaactcgcgagatggatgggatcgagggtttgggatgggggctacctgcagagatcgtcgagaagctcctgcggcggcagctgccccctcgacgacgaccggttgagccccccgccgcccgccatcgccatccaccgccgccgccgcgccgcccccgctcccacccctcctctctccctctctcgctcgcctccggaatccactgccttgttagttgctgcacagttcacaaggcgcactttaattttacgtaaactcttttcgaagacggaaaggtgggccgtgggctacaccctaataaggcgtaattttattttacgtaaacgagtttggaaggcggaaagtgtgggggcaaacagtagtagattaaaaatcggaggagagagacagcgaaggagcggaggagccgaggcggggggagggaggccatgatgccgccggcgataagcttggctcgctctccgacgtcgtccgcctccgcttctcctctctaccccgtccgccgatccgccgcagtcgccgtccggcaccaccgctgcccgtccttcgccaccaaacccgctgcaggtcttatctaccgctccaattttcttggcattgataagtaattgaggttataatcgtaatcctctttacaattgggtagtattggattatccggggaagattaatttgacagcacgcaatcggtttggttctccccaaaggatgggagtgtcgtttagcaaatcgactgaattagtatttggtgaataccttgctccaactggggcatttggcttagagtgttgtcattagaaagggtaccatgctacctcaaaatgaatatatcgcgataatttgaacttactacactaaacattcagtgttttatatgttggtcttgtatgagctaactgtaaatttatctgggtttatttcacatggttggcatgtgcccatgagaatgtctactttgttttcaggagtttgctgtgccagcccggcggttgaattgttgccatctttgagcccagacatcctggttcgagatgcgcggctagaggattgctgggaagtagctgatactcattgcagctcgttctttccagattacacttttccactggaccttgttctacgtattgatcgttacattgccctcctatccggtttttcggttccacctggctgcatgagaacttgccttgtcgccgttaacagtaattcgcttagtagaagtatcagcattgaatgtggagatttaagagatgctgacttccaagaaaaacacggtctcagtaaggcctccatagctggcattcttacagtagacacggtggcagactatcttcccagaagagggcctctcaagcagagaaggtatacctttattttcttcaaacaccttataagattgctaacacatatacacatatgcaactgcaagatataaatggtttgcttattctttgcaccttaaatgcattcactcacttttccaaagcctgtttaccatatccattctacttatggtgttgtttcctttttgtcctgacattgatgttccttttttttttggtatccctcagccaagtaattattcgtcccattacatttgaagcttactttattggcttgggaatttctaacagttcataccaagctacaaaaaattgataatttgttgtaatgcctttccatctctgaaggatatgtgctagtcaataacagattaacacaggtcatattaaaaaaacatgctagttaataacttaaatttattgtgcaattggagccttgaagactacacttgactatgcaatgccataaaaacaataacatattattttatactaattgcataaatgggggaacacctgagttcccatttttcaattcatatacattttgctaaatatgaggtgcatgcaaaactcaaatgccaaatatgttttgtcttaaactacttgtgtctagaacagtgataaattatgatatgattccttcccataaaatggggagagagtatttaagtatacaaagtaatggttcccttctctcataacagacaagtgtttcttgcatgataataattactaaaggaaagcgtttctctttaccattggagtcgggaatagaatttctgaactatgccactgttgatagaaaacatgtggcctgggaggtctgcttaactccagtgcaggtccaaagctcgccttcggatgtgttagcgtgccagttgatttgatcctgtaatcaacaagaaatagaagcaaagaagccgtggttaaatctataaatgatagccaatcggctagatgccgatgacatatcatttatctttgagccgatgtcatctgtgtatcgatcggcggtcatgaataagtaaaaaagaactaaatctactcgatcggctgtagatattaatgatatatactccttatatcgatgtatacttaaatcaagtgattgggatagatcggtcatcatgccgagacagtataaatcacttagatcgaaatatatatcaataacaggactatatatgtttatagcatagccgatcagataaatctagcatgtatcggctaatactccgatactactccataccaggatattaaagcaagaataatgtatcaaacaaaggcctaacatatttagatacagcaatatcttgatataaagggcagatttaacatatcaatgaggcatatagaataaatatagttaaatcagatacgatcagctgaaactccgatgctattctaatcggcaactagaaggcaggctagagatcgatattctaagcacgacttaatagatcaaactcaactgatgcagcattaagtatgaaaagaataacgatatctagacaatcaagccgctagaagtttcatagaatggtagatatctcatataatctagatcaacatcaatatttaacctaatcggctaccctctattaacagaagttaaccgatggcaggttagatgatgatattgctagagattatgtaagacatatgataactcgacgaattacataaacgggattagagtatcataaagatggaagcactaatcctaagaacgcaatccgtcataacgaattttacctcttgttgaagatcgaaatcgatgcagctcaacccgaaagcaagaactcgtcgaaacaaaactaaagcaaaaagggtagcgatacgccgagattgtattgaacgtgtgttgttaaattacatagggctcggggtctatttatgcccgagaattacaagatatgcccataccggacatgactattatctctaacaaactcttaagataccataagtctttgcggcagacttttgcctatatttatctataaggaatttacataagatatcctaattaatagatacaattgccttcccaggactctatccgtgcgtggcaatcatcttgaactacattaacttgaacccgatgtcgtgtacaagtcatattgtcggaatcggctgtaccggcttacttagcccgactcagacctagccgatcctaaccgtagccgatctggactccggccgattcctgctctgtttccgaactcgatctccgcttccgacttcgctttgatccaatcttctttcctgacaccgatgttaccaaatttggttgttaacagccacctaagccttgttgcacttatatttcgttggaatttctgaaatacagaaagaactattaaattaaaaagagtgaaactccactagcagcatgcatagtaaatctgcataggacccggcaactcaatcgtcatataaaacctttttgttgcaacaaatttcctatccgtggcatcttaattttctcccaagctttgcacatagcagtatcatctttttggttttcaccatcctcagtcttttgatcactggtgccaagatgtaatataagtcttaagcacaattggtttgaatcaatcaaaactaagaaaactacaatcttgggcataatacataaaatgttgtgctccattttttctccaggaatgcatagttaacttaatgctaggttttaatttatcatgatctgtacctcatcgcattgaattttaccatcacatgttttttctctatactgtttatcctttttgtaactaccatagtccatgtcattctcaccttgtaagtttctaaagaaaaaagctatatattgtcctgatgcttcgacatgagttgcttcagctcccgtttatggttataacttgtatgtgcccccatacacttttctgtttgctgtccttcctttttgttctttgactaagatccaaagggagatacagttatctacagctagacaaacacaacttcatgcgcactctcttttcctgtattgactgtccacctagggcaccatttgttgccttggaatttatttggagatgtctctttcctttccttgggtgactctcacctagctttacttgtacaagatgaaagaactgtgtgaaacaagagggctcagcctacctacagaattttgaagaaaatgcaataaatatcatgaatttcttgttcattgttgactatttcaagaaaatatttgtaaacagtgagcaaatttgaatttcaacttgattggaaacatagaggaaaaacatgtgttttattatattttttggagaaatacatttaaatgcagtgcaacttgcctgggttaaaatgaacatccagttcaatcaacgaagtctatcatagttagggattaaaccgtcttgttgaattaggatagaacgcgcattgtatttgtgccacagccttcttttttttttcgccgggttggccgaaggaatggctgaccaaatttcattaagattggaagaaaacaaattacaaacatacaagggtacatcgacaagaagttgtcgaacgtgttgtgaggcaaaaccttaccccacgagaaagggaaaataaaaagccctaaggctgaaaaacagttctacttctcacaatgtgaaaagagacctgcagacttccagatgattatttcctctttgatatcctcaaccaactgagcagggtttttgtctctttgttcgaatactcttgcgtttctttccttccaaattagccaacagatcatcatgaaaacactgccaaaaaggctgccctgtgtggcctttaatctcaccagatgtgaaatgtcatatacaagataacataaaaggatattctctgagttcgtttcttgtggcagttttctaatatttattgcactgcattatagagcatggcacctcttatgacatccatctcaacactgccacaacctcttctaacaccttatgcggtctaaatgaagctgcagcactgtggcatgtatggaataagttgtttttggttggatacaaagtcaacaaaaacattggttgtgctattcttttgcactgatgaaatgctcagatatgtgaagccttgttttcatttgcctcactctgtataaactgtagaagattgtccattattatatttttggagggttaatataacacacgagctagtactttgccgcctgacatcatccagatttgtttgaaacatgcagaacaggtattgcatatatagcaaatgttgcagtccgaaaggaagaacgtcgtaaaggaatcgctaaaatgcttgttgcagaagcagaggagcgagcaaagagttggggttgccgatccatggcattacattgtgatgtaaacaacattgctgcgctgcgtctgtacaaaaatctaggatacaaatgcatccatgtaccagaagatgctaagtggccagaacctaagatagcaaaaggagtgcgatacaactttatgatgaagctagtacccaagatgtagtgtatatgatcagaacagagaaactgagacacagcttcacacttgaagctattacccaagatttgaagtgtatacgatcagagtagagcaattgaaacatgtagatactacagtgatgtgcgagctcattcacttcacatgtatagtagctgtatagtggagactggacagtacattgtatggcatataattgctatgtattgttttgaagtagtaaccatgacatcattccttcactcagagctcctgagaagtagcctgaagaaggaaacaaaccatacagcttccaacattatttattgttgttctcaatatatgatgatatcccccttttcccccttggtggagcatattcagttatgttctgtaacaatcttatgactagtgtacctgaagatatcagatattcagaaggaagtgctgtggtttcattgtgccggttcatatttccactggtctgtatcatggatctgcactgtaaagtggtaaatgtatttactgtcattttcctgatgaactcttctagcttaatttggaggttgaaatttcagcatgcatttatgctcttatgtttccttatcaacaccttcattaattgctgatacatctacaacaacaatgcttgtatactaaacaatggcaccctgagactgtttgtgtgttaacaagagggggtggtagtgtgggctgtggcctttatgatgtttggcaccaacctggttacccccttttctgaactgtatggttgttggatcattgctgataattgtttctttggttgagcctgctgtgctgatctcattgaggaaattgaaaaaagatttttgctgttgttgagtggatggtgtggggtgaggaggactgggagatagttggattggatggaagctgaagaacatgtcacatgggatgcatatgcatatgcatgtagagccctcatcatcctccacaccacaccaataaggcagatgcatggatagatctgttcataatgcatgtgactcaacgaattttaacatcatttatctccctttaggacccagaattatgccctgcacaaaccacacacattgcaccattaagattcagatcggtcataattatttttgtaacaagaaaaaggaatacttgcacatggacagtggctcattgaaaattttttgactgctgataccgtgtcaagtgtgaaaaactgttaacagcttccaagtagtgaatagcctctaatactgacgttctgattggttgatctgtgttttgcccgtgaaaaatgtttcaaaattcgaaagatctcacctttgtcaaaatctgttcaatcttaggagcagcttctcatgttattgcacattagcatgagatgtagacacataggagttgttaatttgcatgttcaaagcattgtttactgggatccacttggttttggtatttattttacgatttgttaacgattaaattagcaattttcaataatgtggttgggtagggcagtttgaccgggaccattttgacatctctgctttggtgggaatcccgaggcaaagacgaatcctagtctagtctgtcagtgtagaagaaagaagatggctgggctcaccggcgatcgccggtgccggacaccggctgcagccggtggagtcgccgtgtcggtggccgacggccgcatcggtgcccggaacataggtatcaccaacacctgatgagctgtttgctgctgctgctactgaagaaataatttgatttattcggtgtagttttgtgactttgtgtagcagtagtatatactcctccctgtctgccataccccatatcaccgacaactccatcgtcaccctttcccatatggcctccataattttcaacaaaaaaatgcagaattataaaaacctagtaaattaatttatatcatgttgaaaatactacactctgatagaaattaattgaatcatgttcataaatttacgttgccgtgaagaaatttatatgcaatcaagttaatcttatgatatgaataacccattggaaattgttgctttggacgagtaaaaagggaaaataccaatgcaaggaaggtatttggactagctaaaaagaggaagatgttcactccctaactaacaatgcaaactgtagagagaaatcccaacaataatatgggagagctacatattagtatatactatattgtttacatatattcttctatgaaaagtttgttgcaaatgctccttagtgggctcccctaactgaattttatgtgctatttggtccaataccagtgattgtttctgttttttttttcttcttttataaattggtcttttttcgatcatatgtgcagtgatacatactttgaagttttcctttcttttttaggagaacaaaagtagtacggtatgaccgatgttgtcttatttttctttccattttccaaagtgataaaatggacataaagactagagattccccacttgcaaaaaaaattaaaaagaataattcagattctccacatctttgcacgctcataaactataaaaattagttagtcatcacttggtctagaatacggagcttagtctttggcgcacatgcaaccaacgtgatcccatgtttaatttcctttattttttcccatcttttcatttcccttttactttacgttttttaaactaaaccatttgtttgatggttgagcatgcaattccagcatccaattgacaaatcccatcacctaattatgcagctgctaaaacagtagaattactattatatatttgccataataatgatgcaacgacgtatcttagaagcaagattaccagcacggcaaaacactatagtactaccttcaaaaaaaaaagaattaaaagggccttacattacacacgtatccatcaaaacatgtaagtagaggttagcttccaaatcaattaatttctctgtatgtacccaaaatataattactttggattgtgacatgaaactagtaattaatgtactccatcttggggcgtgtatgcatatatacatacattggtacacaaagtaggggtgattaagaagttgcaacgacagtagtggcgactaaacaaacacttgcaaaaagcaatgcaagtcattttttgtcgtggtacccatcctacgtggcgatggctacagcttgtcagcttgtgccagctggccgcagagatgctggccagtggcacgtcggattcatgaggcgacgccaggtcagtattacaagacagctcacaggtcacaaaagagcatagtactgtgtactcctaattaaactaagcagcttgcttgcttttctcccatgtacattgtaccaatacaaaaacaatataaaaagtatattataatataaaattaaaaacaaagtgaaaaatatgctcttctagtatattaattaaaaaatttattggcagaattcatctaacttttgcattccttgaatggaggaatttatagaattttttttttttttggaattgaactaatccatttgaaatttctgtaaaattcaaggattcaaaaggagtctttttattcttgatagtctcaccctatccaaccttagtacgcaaaagagtgtagcatgtgccgtactaagttggttcagcttagccgtcgaaatagaggaagctatgtatatgctactaccatccaaaagctgtacctaatatagttcgaccagttgtaaaactatatgattagcttgaaaatttttatcaattccaccgtgttagcgtccaagtctctgcacctaacctataccaatattccaccgtcatgaaagcgatgcactgatggctatatctaagctccatatgcctccctctccaaacacattgcaccattggttttattattattattattcatagttgtcacttagatagattgcacattgcagttcataggtcaactgttgtgtccgctgatgtaagaaaatgtacacttgagtaatcatcagggcttcaattaatcacttgtcataacaatcaattttggcattcttatgtttcaagttaattagtatgttctgtttctaaaccatttgatcaggattgtgtactgaactgtgattattgttattattattattattattattattattattattattattattattattattattattattattattattattattattattattattattattattattattattattattattattattattattattattattattattattattattattattattattattgctaattgtcacatagatagatcgcacattgcagttcataggtcaacattctgtctgctgatgaaataagtatacacataagtaatcagggtttcaattaattaatcggttttcataaacaatcattttttggcgttcttgtgtttcaaattactctaatgagtatgttttgttcctaaactgttgatcagggtggtgtactgaacactgtgatcagtggcctgaaaattcccagctagtataaaacaaagaggaattattatttggtggcccatagaaactgaaacaattatatgctgagagaaacagaaaggggggatgtactgtgtacaggaactgtgatgtgcatatgggtagcccatcacctgatcaatcgatcgatcgattggatgatagtatagtgtgctttcaaggaattcttctgcgtctctctcccctgtcttttttctctttgtttccttccttgcaagccaatgctcctgcactagctttgctgccactgtcgtgtgggcccccctcgccagcgtgtatgaagaatatgatagctccacctgtcattcactttgtgtcaatgtatgtactcatgtcgattgtgctagtcgaagacctgtggaaaaaaggagttgacatttgcttgctcatgttgctgcgctcattgcgcagcaaaagtctggatgtgatcctctaaggagatacaccctccgtcgcaaaataaatacagttgtgggtttggacttggctcggcgcgggcggcttacgcgctagagcgcgcggcgcgcgagcgaggcggagcggagctgagcgggggagaagcggaggggcgcagggcgcggctctcgcgtccgcgcgcgtgcaccgcgtccctcccccgcccgcgcgcatgagccgcgtactccctccgcacggtgagccgagccgctgacaagcgggtcccacccgggaccgcgcgtggtgagcccggtccaccggccccctctctcctcccctcccgcgcgcgctctgggccgggtcctcttgggccggccggcccattagctcggccgagccgcgcttcttctctcgggccacgccctagccgcccgagggaagtctacttctcctccctctttcttttctttttcaaaaaggatttaatttaatcctttttcctttagatcaaaaatccaataatcttagaaattcaatatcttcccaaccgtaaatccgtttgactccgttcaacttccaaaatttctcaaatctcgagatctatctaattgcacgcttagaggtcattaatagggctttatttttgccgtttgttgagttgtcccgttttgcgtgtagtttcggagcccgaagacccgcagtgcgaggattttgaggatcaagctccagatctcgagcaaggcaagccacctttgaatatcttgagcctatatttgaaatttaattatatcccttgcaaaatattatgcattgataggatcgcacttaatctgtttgtcccgtctgcaaggcagattggcggacctacctaatttgtcgcatttgatccttcctttgttaattgctatatcttgtccccttgtaaccatctagttgcgtctcgatattcgtgcaccctgtgcgagtatcgacggacgccttcaaacttaaaatctgtttaacaacttgggtaaaactggagttttacaaaagacttggaaaacccgacacctgggtcggtgcttgcgaactaaatgaattttccaaaaccgcggatcggggaacgtaccgggtgtacggtttcctgctcttgcatttaaggaccgattccttggaatttcatccaaacataagacaagtacgaccacatgggtggaatgggacacccctggctgagtaactagcttatcaggggagccttgatgccgagagacatgtggattcgccggggtggtgtcggggaggacccctgggcttcctggcacagtatggtctgggacctaacctgttgttggtctgggacccctctcgtcggcatatggtaaacctgtgtcggctttggaaatgccttgtcatgaaagcttggaggtctcccgacgtggctgatccccacgggctgggtgatccgggttagtaatgtcatgtgggtaaagtgtaccccctctgcagaggttaacaaactgttcgaatagccgtgcccacggtcatgggcggatgtgaggtgattcctagcgtagtttggtttgactactgcttgtgaaattgctgtgtgaaaaggggttcggtgtttgaaaaatctgcagctgatgggatcagctaggcccgggtggccgtttgaaaagttgttggcccgggtggccgtttgaaaagttgttggcccgggtggccgttgaaaaagctgttggccgggtgccaaccttgtttaaattctaaagactgatacattgcacatactccgaccggacgagacgcactgtctcatccgtgtcgtttgagaagcactcacttagttgtttcagaaaagagttcaaataaaattaattgcaaaaaaacaccagcctttccttgaagcctgcattaaacacttacttcccatggcttgctgagtactcccgtactcacccttgctctatataaataatcccccccagttgctgaagaagatgaagcggatcctgctgatgaggagttcttccaggagcaagccggctacgatgagttttagggtttcggcctagttcccaagtcgcgcctgtgttgattggtccaagtcctggcttccgctttccttttgtgatgcagttgtgagctcgggatctgtccgcagcccaacatgactgtacatctactctataataaagagacctctgttgctgtgatattctgtctccctgtgatatcagcactgtttcctgggactggtatcgattaacaggttaatttggagcgtcacgggctagtgctggtcgggactagttcggggcgtgacagggttttagcacctaactttgatcattcttcttatttgaaatatttttatgattagtatttttattgttattagatggtaaaatataaatagtattttatgcgtgacttaacttttaaatttttttcataattttcaaataagacggacggttgaacattaggcacggaaacttatggctgtacttataatgggacagagggagtatatacggccccattgtttgacaacatatttacaaacaaagataatttaagaataaaacttttatatatgtgttcttagcgatctaaaagcaaaggctgaaagataaacttcaataaaaaaaatcctaaaatcaactataaatttaaggttgaaaatttaaattttaactgataagtatatgcataagagaaaagatgaggttggtagatgcatgggaatttcttaccgacaactataatgttctctattggtaacataaattgattcaaaccgtttatttttcttttggaatccaatgaatcactactatcttaagtactagtggtaaaatatattttaccaccgtcgtcagccattaaaaatggtggaaagacttacgaagaggacagtactggtagcagtagcttggctacatgctgtcaaattgggaactgctcattgatgaacagaccgggatgttgtaggacctcactatgaaactgatgtcaggtcagctggttggatcggttcatcatggttcagaaaaaaggtgggtttatcgtcagattgctataccaacatccagagctgatttggcaaataaacagtatgttctgaagatgaaatttgttaaccatgctgaatttgttaaccgactcgctatcaatattaattattaaagaccccacagctgaaatttataaattaatgaataatctatttctttttataacctacttcagagtaaaaataaataaactaattattattacagtgtaaagaggttggtttagaatggaacaatttttaaagagaaaatttcagtatgaaactagtactcgtagctagcagcatcgagataatagatgtactatcaccgaatgtaacacatattaatattatgaatcaaacatctaattctagatttttttatggaacggctggagtacgatagagaggaggaacctcatttgtcgacttcacaacccagcagcgcgtcactgaaaatcgacccactgttgttcttcttgttcagaatccaaacagacaccgacgcgtgaacgcatgcgtgatccccgcgctgaattgcccccctcctcccctctctctgccgtctgatcacgcccatcggattcggaatcgacggcgtagagcccccggtgatcactactcacatggctggctgggttcacgacaagccaagccgcgggcggggggtgtcacgtgccgccgaccacgctgccccccaccgcgcgtgagctgtccaccgttgcgttgcttcgtttcctggttcgtcgtcgctgcgtgccgccgcaccactcgctcactcactcgcccttgctgtgttgtgggacccaactgcagtgagagaacaaacaggttgattagattagattagattatactacggcctcacacttatacttatatttatcagctttgaattctcaatattaaatttggagttgaatttgagttttttaatcaaagtttatttttttagcctttgcttttatatctcgaactttattttttagcctttgcttttatatcgttaggaacacgtatataaaagttttatttataaattatttgtcgttggtaaatatgtcgtttcgcttatttgttggatgataggttctcgctattgtattatttggatgccatcacttgaatggatgggcattggatacaactagtagcatagattatacaactactacgggtgctgaacaaataaagtaggtgatcatcccaaactagagctagtactgtactgtacattgtactgatgaaaccagaaagggcattatcatccatccatgaggggtaacatgcagcgttggtaaaaaaaaaaaaacttaaaagtaaagtgggcttgtacttgcacccacgttctgcaatgctcaatgctctactactctccagcactcttcctctccaggcaacaagctgcccgttttgggcgtttgccatctcgcaattccccttttctttatcctgtttctcgacatgggctagctgcatgcatctctgcatcgatgcatggtctccacttgcgctttgctgtacgcgttacgcaacaatacagcagtaggttgtgcttacggcaacaacaatgcatatagcaaaagtagtccatataaatgggacccacatatatagactataactattattatcaatgtatatagatagcaactagtattaggaggagagagaaaatagagacaaataacatattttattctatatgagcaacacatatgcttatagcttataggtagcttttgctattttcttgctatggactagttccacaatatggtgaggtagctgaatgaaatattttattgcttatggactagttttagactacattgtggatgcccttaggttgtcagccacgttttaccacagttttgtcacgtctaaggttagacgggtttgatcacattagcagttgtttgtttatagatacagtcatggcaatattttttttccagcaaactaaatctcgcacgccattgacttataaatatggtaagatttccttatgcttgttaaggtgtgaaaaaatttaatcgtttcaactttaagtaagtgtgctaatatttatcggtaaatagtggtaaagtattatctattatataattaaaggaatagaaaaaggagcctccacgttcgctctcatggcctagaaattctcacattaatcggagaaaaagaaaaaacagagtccatatagaaatacaatttacaaatagctgaaattcggaattaaaaataaggaatattagaagaggggactagagtccatatagaaatacaatttacaaatagctgaaattcggaattaaaaaataaggaatattagaagaggagactagagtccatatagaaatacaattagaaaatacctgaaattcggaattaaaaataagaaatattagaagtagagtatagactccatatagaaatacaattaggaaataactgaaattcggaattaaaaataaggaatattagaagtagactatatagtccatatagaaatacaattaggaaaaaatagaaattcagaattaaatatataatttaaggaatagaaaaaggagcctccacgttcgctctcatggcctagaaattctcacattaatcggagaaaaagaaaatacagagtccatatagaaatacaatttaaaaatagctgaaattcggaattaaaaataagaaatattagaagaggagactagagtccattaaaggaatagaaaaaggagcctccacgttcgctctcatggcctagaaattctcacattaatcggagaaaaagaaaaaacagagtccatatagaaatacaatttacaaatagctgaaattcggaattaaaaataaggaatattagaagaggggactagagtccatatagaaatacaatttacaaatagctgaaattcggaattaaaaaataaggaatattagaagaggagactagagtccatatagaaatacaattagaaaatacctgaaattcggaattaaaaataagaaatattagaagtagagtatagactccatatagaaatacaattaggaaataactgaaattcggaattaaaaataaggaatattagaagtagactatataatccatatagaaatacaattaggaaaaaatagaaattcagaattaaatatataatttaaggaatagaaaaaggagcctccacgttcgctctcatggcctagaaattctcacattaatcggagaaaaagaaaatacagagtccatatagaaatacaatttaaaaatagctgaaattcggaattaaaaataagaaatattagaagaggagactagagtccatatagaaatacaatttacaaagaaatttggaattaaatatataattaaaggaatagaaaaaggaacctccaagttcgctctcatggcctagaaattctcacattaatcggagaaaaagaaaagacagagtccatatagaaatacaatttaaaaatagctgaaattcggaattaaaaaataaggaatattagaagaggagactagagtccatatagaaatacaatttagaaatagttgaaattcagaattaaaaaaaggaatattagaagaggagactagagtctgtctatatagaaatacaattaggaaataactgaaattcggaatgaaaaaaaggaatattagaagaggagactagagtccatatagaaatacaattaggaaataactgaaattcagaattaaaaaaaaagaaatattagaagtagagtatagagttcatatagaaatacaattaggaaataactgaaattcggaattaaaaataaggaatattagaagtagagtatagagtacatatagaaatacaattaggaaataatataaattcggaattaaaaataaggaatattagaagtaaagtatagagtatatatagaaatacaatttagaaaaaaaaatagaaattcggaattaaaaaaataaggaatattagaagtagagtatagagtccatataggaatttaaaactaactaaaatttggaataaacataataaaattaaaagtagagtttagagtctgtataaaaatacaatttacaaataactaaaattcaaaattaagaaaaacattggaagaagaatttaaggtcaatataggaatacaaatattggaatataatttagaagcaactgaaattcgaaattaaaaattaaagaatattgaaagatgagtttagagtccacatagaaatacaattagaaataataaaaattcataaataaaaatgaattaaaaaaagaaatattaaaagacgagtctagagtccatataggaatatatataatttacaaataactaaaatttgatattaaaaataattaataactaacacgtatataaaatataatataaatattacacattagtagttttgtaaagttattgtaaaatttaaaattatgttgtcattttaatatatttgaataatataatgagaaaacatatatgctattatatgagagaaaatataatgatgctagccgcgcaatctgcgcgggccactatgcttgttagtaataaatacatctgtagtagagaagtagaccagccacatcttccatttcattctctctgtcctacaagggcaagggcattggtcgtcgcatccggtttgggaaacagttcccgggtcagctgccttgcctgctccatccatcacccacaaaatcaacggccggatttgatccaacatattaactctctttgtactgcatccgttacaaaattagtgtagccgtggatttctgtgtctaacatttgaccgtatgttttatttaaaaaatttataaaaaaaaatagtcacgtataaagtattatttatgttttgtcgtttaataacaataaaattattaatcataaaaaaatttaaataagaagaacggtcacgtataaaacttattttaggacacagggattttcttttctccttgcattaacggcccatctcgatatattttagtttgttcagtcaaattaaatcgtacaaaaaacgaatgaagcatatactacttctaaaatactatgcagttaggtttgacaaagcacgatccacatgacgtgcctgcatcgatcacgatttattttatttattttttaaaccagatttcttttattttagaacagatcaggaattcacgcagagttggttacctcactagctaggaagctacggcgcgcgtattaccacttcaacatttggcacgagacaagttgatgaagaaaaataacaacattttgacagagtacaactgggaaggcaatgcagaggaaccagtccttttctcaactctccaagataattacagagtcaagctagtaaaacccctgttttatttacctctgcattttttacccatgcgtcagttagtaaaggcgacgaatctccaatccagctccggtcaaagcaacaattagcatacactactatactatactagaatgaggtatagtactatactatactagaatgtacaactggtagttgtagtagtggcactaccgctacgacgaggactgtgtgttggtagtgcataatagagggcaagcacatgacatgattaacaccttaatctgaatttggactgtatgatcaatgttgtacgtgcatgcgctgaccaggcacagcaatatggacacggtggtgatccaagaacgcatcagctagctaatacttccagcgttacaaaaatataagcatttctataaattaaattttgtaatacacaacataaacatttctaaggaactgatttcaacacacaaaaaaccaagcatctgaagttaatcagatgcttacaagacaaatctaaccaattcaaaattcaaattttaactaatgagagatggctaaagggagatcttgtctttttaatctttgctaaataatctataaatgtttgtatttaggaacctatggagaactggctgtaactctttgagcaaaaaccgatattatattctattattaaaaaaatacataactaagctagtactcgtagaatacatgcatccatgcacacgcggagagatagcaggtgaagcagctagcagaaaccagcgaccgggcaaccaaccaacacgacgccagggtgatcgagcttgcaagccacatgctagctcatctcatctcatctcgcggctataataattctcctctgaataacttacttaaatttctagctctaattctaccatcctattaataaattgtttaatttaattaatcaggagccatccattcatgcatcagtgtcaaactgattagtaccactactactccagtattgttacctctcgcgccactggggtttgctccatcagctccctttatttttttaaaaaaaattatgccctcgatttgtttatgtcagttcattatcaaattgcgcaattgggggtgatccaaccatgaatttgggctggtttgtctgttaactccggccatgtgcgtgcatgctttgtctgaatcttccttacgtttgatgatccacctaatagtactaatctacaatcttgttgattaattaacctgtgcagtgaaaccagaggaaattccaagcagttagcctgtcgcttatctcactaacaggcgatcaagtgagttaattatcacaaggatactcaggcatactagtgaattaattatctcactaatcctgatgaattgttatcactacttgttgtcttgctcattagtcacaaggctacagtaagtaagagcaggccatgatactagcaactaatgtacatgttactagctgatataatcccatgttactcccggatcatccagataaactctcatcttggtcttaaccggccggtggttggatggatcgacccttttggtacattgacacatggctcgatcgatcgaccggtggatttcacttcaattcattaattaatcagtagctagccatttctaccagaatgcaagcttttacttgcaaggagggagaagggagaatctgaattccagtgggccgtcagcatcggtcacggttgattaaaaaccaagtgattctacggcagagataaactagatagtgccagtttaattactggcagcatttgaatgattggtgccctgcctgcagtagtactagtagagcaagtataatagtacagtctactcctagctctaattcatcaatagataatttaatagtcaattcatacaataattgcttattatactattaatatatggtcccacctatcatacacacaatgtgtcttggagtccgtgctatagctgactacagatctatagcccgctgcttttctctctcattgtttatctcattaaaatatgtttacagctgcctaatagcctactattggaactgatcgtagtaggagtaactttatttgtctgacagcacaaaggggcatgttgagcatgcagcaatcataatccgctccccctagggatcgatgcaggggacttgaatatcccataattgtcagagatcgggtgcttcttgtcgcttcttctcactgattattactgtactctactctctacttgcaacaagcaacaagcagcatcatgttgttgctgctcctgctaatgccaatctacctggccaactactagtagcagtaacaaatacatgtctgattctctgtgagttctcaatggcaaaagaagacaaggtgcccatgagaaattgtacaccctccataccaaaacgagttcatttgtaaatttttatgttcaacgtttaaccattagacttattttttaaaaaaaataatataatttactatttttattattattagataaaatatgaataattcgttatacatgacttgtttttttaacattctataaatttttaaataaaatagatgatcaaacgttaagcatagaaacccacacataagcttattttgggaccgatcaatgtaaacggtactggaaccagtagtactacatgtgtttgttcgatcgctgctaatacgcacagctaactaaccaccaaacgagtggttaaacgacgactcgtgatatatgtcacgcactagatgaagatgagtactcgatccgatggtcctcttctccgtagggatggatggatggatggctggctgtctcgccttgcaacaaaccataattaatccttgtctgcccggaacgcaggtgttggagctaagccaagccaccgagctgagacagcatgcatgtgtgtacagtcgtcgtggcactggtactactactgccaccaacagtgtagtactgaatccaacattatcagtatactactttttccattcgatgtactccctccgtttcaaaatatttgacaccgttaactttttagcacatatttaaccattcgtcttattcaaaaaaaaatttgtgaaatatgtaaaactatatgtgtacataaaagtatatttaacaatgaatcaaatgatataaaaagaataaataattacttaaatttgttgaataagacgaatggtcaaacacatactaaaaagtcaacggtgtgaaatattttgaaatgaagggagtatacaacaatcgtgcaattatatgttcaacagaagaataggaaggaagaaaatgaggccagaaatgctacagcaattgttgcttgctggagatgcaagagagagatcagaggcggcagttggatcatatcaagtgagtgagtgatccgacaccaacaaattgaagccgtacctagttagccacggccatcaagcgaactgatctgatcgagctgagagagcagcacagccactgatcgaatagctcggccaattgatttgacgacgtatacgggttggtgttggtgacgagtgacgttaactcactcaactgttcagtctcgaactctccttgctagtatgccactcttcaacggtgttctttttctaataaagataaagatcaaattagcaatcctaaaattaaaaatatattaacgtatgattaattaagtttttttaaaccactggcggaactttgttccacttttatatttagaagaagagaatcggtccactttagaagaaaaaccagacccgaaaaccatacaactgcacggttaagattaattaagttttagttactgcaaacttgaacgatgaatttatttagtattttaaaacaatttttatataatttttttaatcaaacacaccgtttaataattttaaaaatatgttaacaaagattgacataaaatttgagttgcccggccgattgatttgacaacgtatatatacgggttggtgacgagtgatgttaactcactcgatcaactcttcagtgtcgacctcctttgctagtataatatgccacccatttgtctggcagaggtcgctcggccccgtcggtggcaaacaagcaaagacatgccgcgcacgaatttctttctgctgcgtccgcagcgcgcgatcgaggaaaaagtcggcatcattaggctcgaattatgcctcgcgaaaacggcagtggcaaccgcaacaaccactgaaaaaaacacacacatatgaattatgtcaccgcaaaatggttaataccttttcaattccttcccatcaagttgtacgctttaaatattttttttataaaataaaatgatgcatgcttcatcctccagatccctatatatatatatgaaaagtttaaacattcattgacgatatggacttatgttcacctgattgaaagtgggtttacgttttcgtcaaattgactctgataccgtatcgagttttacactaaaaagatgaagccaagcattacgaatccgactgtcgtacacgtggaacaggctttggtgctggcgtggccaatgggtttaggtgtgatcggggtagagagtgagagtgagttggggagtagtaaagctcaaggaatggatgcaaggagtgcaacccaagttagttatgcaaagaaagaagatgatatgagaaaaaaaagaaaagaaaagaggttgatcagtagcgtagtggagtgggacccgtcatatgatttgctgggggcagtgaggcccgaacaaccatcggttgtgcggtcactttactcttccttccctttccgttgctccccttttccatcaccacgcacccccctcttctccgttctcccgtttccagcaattaatcgccattttttccgtgcgatttttttcccaaccccaaccacgatggtcgttaagtcacatgtggcgcagctgtgcttgcatgctgtgctgcctgtgcaggacaactcttgttgttgatttgtgtgatcagtacttctctgtttcaatatacttatcgttttaaaaaatttttaacgttcaaccattcatcatattaaaaaatatatagaattattatttttaaatttgcgacttaatttattaccaaaagtactttaaatatgattttttaatttacactaatattttaaataagaagaatagtcaaatgttataagtaaaaactcaaaaagatatcctaattttagacgggtgtagtagtagtccccgatggcatcccatccacctgcatgcacgaacgaaaccaagttcgttcgtttgtattcgtggctgtgtgtgtgcacacacgcaggaggtagtagtagagagaagtaggtaggtcgagtgagtgagtgagtgacccgacctggccactactgctgctcgatccagatgcgatcgttcatgtgcaggtgtgctttgctaccaccaacaccagctgcatgcatgcatgcagatcgatcgattggcaggataagattaatctagtagtaatgcatcagggatcaaaggatcaactactactactattacgtcctatatatgtgcgtatacgtcatgtatatatcctagtaagtcgtaacatgggcacggcagtaattaagttcggtaaatatctatcgaccgaagggattaatttgacagagacagtggattaactgcactgtcgttcgtgcgcacatatcctccatgggttgggcaatataccagaacactcaaaaaagtgttaggcgagagagcatacgtacgctgaccctagaacgccaacaagtaggcacatagaaaaaaaacaaaaccgaacggatatgcaatcgacgatcgagttagataagttttgaatttacaaccccacgagtcctttggaccgagaaagaaaatttttgaatcgggttcgcgtccttctcaatcaagaggcaattccgcagcgtctgtctcgttgcccaacttgcccccccacatcgccgtcgcggtctccaagtcgcatgcggctacgcaccctgcgccgcgcggctcgcgagtccgcgtccatacggctgccgatcaactgatggacggagcgccgtttccaaaatggtatcgttttggctatttttaaatttttttttctaatttttttgctgtatctattgacactgagtaatttaaataataaatataattaattaccgattaatctaatattgttttataagagatgctaccgattccaattgtttctgaccgttctcacccagctgcaagcgaagcaagacgacgcggcctccgcgcggtcaatgcgcggccgcggtgcggcggcgaccgcgggatgcttccgtggaggcgcgcgctaaccgcgacacggctggacgctagtagctgcgacgagacgaccggtctggcgtgcgaggattttaccagtggccgcagaggatccgacgaccgatgcccgggagcggtggctgtcggttaaacagtgtgaaggagcgagcggcggaggcaagggggaggaaagtcgtgaccgtcgtgacagcagctggcatctcatgcccatccatgtgtgataacccagcgccatgtgtacatacaggagggagagaaaaaaaatctgagctggtgattttagcattttgtattttctgggtttttttggttaactgggagaggggaaaaaaagagggatgtgaggagagagaaagagggaggaaacttcaacgtcacgacaggggcgaggacagctagcagtgagggaggaaggctcacctaccgtccccatctccctgtactgtagcacttactaccagcaagcaattgtggttgctcaacgatcctaattaccacgctgatttgattttgattttttttacgtcatggatggttaaacaacccatttaccacactgctaatcgtgaccgtaatcgtaataatcgtgggagaagtagtcgtcccagacccagtaaatggcatgcatagtagcagcagtagtagtactagttgttgctgggtcctcacgaggcagtgagtgactgacggacggaagcttagctgtagaagggcgcctctctctggtcgtctctttcgtgccgttccagctcgacgcatcgtctccttttttcttcctcccatccgcgtgtgccgtgcaggtcgtgtgcgagcaccagtgtaaaagggaacgaggagtgggagtggatctccactccgccatagcttagctagcctccaacgttcaaaacccaggagccatagcccagcaagcagataccactttttttttttttttttggtttcgtctcctctcaagtcccagctgaaagcctgaaagctgtgctggtttcttaccttccctcacgttctcacacccatatttaatcctccatttttattatttttgaaattttttttgagctctgcctgcagcttaactcctcccccagtatatacatatactagtagtactacatacacctcctcttatagctctagaattgaattccaccgacccacgcacgcatccttttttctccatccccctccttccgttcttccatttacctccacctatatagcactccggaattgcgccatctctctgccttaggagtacagtgaagtgctctccatataattgcagtggtgcaaggcaggcagcaactttcttcttcttcctcctatcataatctgctcatccttttcctcctctggagcaaccatgtccatgcagaaggtgtactagatatatagagttagttcgcagctgctccctacttacataaacaaacgcattcagatagccagcttcttgatcggcaacagcagctagttagagtgcaacaagaggtagcagagacaattttttttggcaaggcaagcaaaagctgatcgaggagagcgatcgagcaggtgttgatcgatcggtgcgaggaaacagagacaattttcccacacaggtgagctgaaagcctagctgctcctgctgcatgtgatgtgttctttcccatttctctctcccccccccccccccccccccgcaaaatcagccgccgccgctttcttcaaattcaaaaaaatggcaagaaatgatcgggaattcaaaggggctttgcattttaagttggcttcccggtggcgcgcggccgtatttcgccgcgtcgccagcttaattcattgccatgcgtgtttttttgcacgttcattgcttcattcatcttccccggaaggaagacgaaaggggaggaatataggaggatgacgaaactcggaagcctccgatttggactctttctcaatttgaagatttcaaaattttcaaatcaattcaaaaaaatcgagagtaaaattactaaagggaagcttccggctactagatggatagaaagtcatggaaaaattggatgggattatcagggttcacacgtcggtactactgctattattccaagctttttcaaccgcgtccccctgattttgtagtacttttttttacagtctggattatctggaaacatttggggacagtgagaaaaaatgtgcaaattctgagaggcaatacgccggcaagcaagcagtaaaaacaacaacaaaaagggaaaaaaaaaaccaaaaagattccttccattgccgccatggcaagattcgcctttgcatgatccgtactgctccctcctcctgtgggaatggccgcgattgatgcgagaaaaaaatttgatgaattcctcggtgttttcacccgaggactcggcaataattagctgcttttaccgagggaggcggctgctttgtccagtggcacgccagtgacgcgtccggaccaatagggcgcctccacgtcagctaatccccccgcccttttgacaaattccttgtgctggcaagctttgacttttactactcgtacgcatagggatggagtccttggtggtgaatcaatcaaacaaacgcccagattttttctttcttttttacttttattatttttttattatttttattttatatacggagtgagtgtatattaattttcttccctgggtagagtagtacgccatctgtattgtatagccttgcttcagaataaagaaaagaaaattcacccgtcacatgcggggtcacatggctgggggtgggtggggcccacccacggaagcgcgtcatcatgcaccgcatacatatggagcccgctcctgccgtcactttgaaagagaagaaaaaaaaatctccctcctgcagcttttgatttacagctcagagagatagatttgcacttcttctggtagtagtagggatagattagtaacgcctcgtcatctatccatttctggcagtggtgtgttgtgtaaccatttatacgaattttatcttattattgatataggtggatcatatccttggaattgattaattttatcataggtgaataaatccgtgttgctttaatttgctttcttattattgtggatactgccttgtttaatgcatgcatatccaaacattgatctcgagatgaggcattattgacacgcgtttcttcattctctcccctctgtatttatacggtgaacagattgtgatttggtagcagcagcaatggcgggcgttggattcgtggaggacatgctgcgggagcagagcctcctggaggcgacctgcggcgacctcttcgaccacatcgacgacctgctcgacttccccaaggaggagtcggccgccgacgtgctcctgctcgacgcgccggcgccagggagcccgctgtcctcgcgcatcatcggcggccacgccaccatggcggcggcgccgccaccgccgccgcagatgatggcgctccccccgccgccggcccccgcgaaggacgacgcgtcggcgctgttcgacgcggccggcgcgctcggcgccgaggtgttcgaccgcaaggacgcccacattggcccggtaagttccccctcccccaccacctccccgtggttgagcgtacggccgatttagaggaattcggacgatattgccgctgccggcgtcggcgtcggcgtcggcgtcggtcgagcggttcaagttcaaaacagctgggcgccaattaggcgttggcgcccgctccacgccacgcggcgcgcgcgtcgtgtgtgaatggggtagttgggtcaggcgatggccgtgtcggtggacgggcgtcggcgtgccatcgtgatgggagttttttgcttccgtttggttggatttttacggcggtttcggcctttttggggcccatttactttgggtagttagcctgcccaacaactatactatgctagtactaaacccaacgtggtacaaacagtcctagcatagcagtaacccttttctccgctttaagcaaccgaaattaaacctgggccccttcctccaaccgctaatgatgattgatttacagtagatttacacagtagtagtggatggaagaaattatgatgtcatggtggtactagcagtagtactactgaccatgaacatgaacagctagtaacgacaaaattagcaggctgctgcaatgcagctgtagaggaaatgtgactgatctgacgtggcaatggttgtcgtttgcagtgtgatgagctggacatggacatggcgcagctggagtggctgtcggggctgttcgacgatggaaccatcccgcacgagccgagttttccgggcgtcaactgcgcggcgccgatcaaggcgtcggcgctgacggcgaacgccggcgtcgtgctgccggacaaggcggaggaggcgctgttccgcagctccagccccatctccgtgctggagcacagcggcttcaacgtggcaaccaatgggggctcctcctcgtcgtcctcctcgtcggcgtcctcctcgtcggagtcgttctccggcagcggccgcgcgtggtccgcgcccgtgtcgccgcgcccggagccgcccgtgctcgtcatcccggcgcgcgcgcgcagcaaacggtctaggccgtccgcgttcccggctgtccgcggcgcgccggcggcgacggagaccaccatcctggtgccgacgccaatgtactcgtccacctcgtcgcactcggatcccgagagcattgccgagtccaacccgcacccgccgccgatgaagaagaagaagaaggccaagaagccggccgctccggccgccgcctctgacgccgaggccgacgccgacgcggcggacgccgactacgaggaaggcggcgcgctcgcgctcccgccgggcaccgtgcggcggtgcacgcattgccagatcgagaagacgccgcagtggcgcgcgggcccgctcggccccaagacgctctgcaacgcgtgcggcgtccgctacaagtccggccgcctcttcccggagtaccgcccggcggcgagccccaccttcatgccgtccatccattccaactcccacaagaaggtggtggagatgcgccagaaggcaacccggaccgccgacccgtcctgcgacctcctgcagtacatccgccgccgggattaatctcccggcggcggcggcggcgtcgtcggaggacggttggtcgtcggtctcagtcccccttagctatatatgtatacatgttagtatgtatgcatgcatgcttgcttcagtcgtcagtgcgtcgtcttcctcgtcatcaccatcaccatggacatggacatggacagcagtgtgatcatcagcagcattgccctcctgaagccatcatccatcatcgatcaccacccgctctgcattggtttccatcagcatcagcatcagcatcatcatcaatccatggatcgatcgccggggtcatactggcgttagttcactagggcttttcttggggttttatttttttcctttttgtctattgattaattggttccccttaaaaagatgattttttgttttgtatagaggtgggtgagagagagagagaggaggagggcaggagaaatagatgaatcacagtggttgttgcattgcagatttgcagttgcttgcaaaattaggtaggtgagaaggagagctaaaccagcagcagagggagacagatttagagaggaaaactttgcagctagtcagtcagtcaattaggaggaggaaaatgagatgtgttttttttaaggggggtgatgaggaagtggagtttgttggtttgctaattagaagtttcttcttgctagtagctactcaggggggacatccatcatagtttatattggagcttgatgtactgaactccgaaaaattctttttgcagttcatctatgtctagggattgataagtgttatttggtttctatactagcaattactttgtagcaattaattatatatctctatatgccttttttctgtttctcctgccttgttggttggtggtgcctccctctgtacaagttgtgatcatccaatttgaggagatatattcctttatgctctgaactttttctttcttcttgtgatctggctacctctggtataactatgcgctactgctgattactgacaactcaatttgcggcttctgctgggcagttgggcacctaataatgtgctggaccagtgggcacttgaacattgctgtactgtcgtgcagattatgaatgggaaatctactgttgtgccggatcagtacaataatataaagacaaaagaaagaacataatgcaaactaattctgacaaacgagggttcagaatggagattatttatcgtcttactacccacagccacaccatagatgtaccgtgtgcggatgatgaacattcaaatcttcatcttgtgttctagtactccaccttagtatgagtgatttttcacggggctcaactgcttgagaagaaactacagtagatttaagaggagtcatgaatacaataacgaatcaaatcctctttagatattgttcggctgctagtggtaataaaacttgggcctgccatgtccatgaaaatgtactaagtacatcatcagcccgtcacaattcgcaatatcatgttcaactctctgcaaatctgccttactctccttctgacctgaagactagaaacagagtcgctctgtttctttctcccatcgttcattgctcatcattaaacggtttagaagtagaggatcagaattagacaaacttgaagagttcatggccaaaacagaacaaagaaaactcgcacaaactgagcaaagaggtgcgggtgcctcacggcaatgggcctattgggcctattgatctcatcgatagcgtcggacgtcctacgatacgatagatcgcctctagtccgccgatcgatcgcccggctgtgccgatctgcgcgaatccaattcgttggtgtggcttcaagttgtggaggaggccggctacgatgtggctgagctaccgccggcgtatataatcctctacccaggtaccagttgacctgttgttttcttgttcttcgcaatccctatatttcaaccaacttggctcggatttcatgttgcattgtgtatctggtgctggattgaacccatctagaggagaaattgctagttggttttgtcgaggagtgatcctctctagcggaaggtcatgagaccctcctttgtaagttcagccggaggcagcgggtgagatttgaggattcggtgagcgaagcagtgtttgtgttgagggggtcgagcccctcaaagatgatgagaccaaaaggatttatataggttcgggccgctaagaagcgtaataccctactcctgtgctatgctccttgagtgaaggattataagatctctttgttggagtaaaatgtggtgttgatcatccgtggctagagactgctctagagtgtccaatggatcgtcctcgatccctcctccctttttctaggcctggacctccttttatatctcaaggggttaccacatgggcccaaaaacctagctccggtggagaagtgttttgcattaaatgcctgtttgtctcttgacttgggaagcaagcgcacgtcatcttgatgatggggcctgtcaaatcttgctgcctgacacgaggggcgcccatgtcagctgctattaatgggtggagacttctgggtccctatttgcgccgggaaacggaatccccaattgaccagggcggacggaccaactctggccaggatgagaggttaagacctctcgtcatcatgactgatgggacaagacagggtgcacgccccctgacccatgcaatagtacgcctgacaccccgggtcctgtcggtcattcgaccagtcacagaccaaattagcgcgcggtgcacgccacattaaatgcggcgtggcgcgtctgctcaggtcaccattaatgtgggtaggtgagcgctcgaaggtggccacctaacccaccgcacgtggcgacctgctgagggggtcgggggagcccgacccctagtcacatgagggggtgaccgccgtcccacttcggacctgactcccctcgggggagggccacgtggtattggggggcagcctcctccatctagtctctaagaaggagtggctgccgccccacctcgggcctgactcccctcggggagggccacgtggtactggggggcagcctcctccatctagcctctaggaatgagtgttatagataatgcatactcaataatcttaggttggggttggcggggcccaccatatactaaatcttatacggaattatgcttcatatacggaaggtgttccggataaagaagaaaaaacaaacttctactcgggcacttaaggattactcggatcgtatatatacttatcttcctagttctatttggacaaggatcatatacatacttatctccctagttttacttggacaaggagacatccgagagtataaatacaagacccctaggaggagggggacacgccaacagaagccaatacaaatctagaccaatggaaggcaagcctagacaaacccaatttggagccacaaaggtcgacatgagggatctagcgctacctccaatctcgccgagttcatattcgagatccgagaacgaatactacaccagccgtcgcctacgtgtgagagctccatgccgccaagccgacaaagactagattaaatcatcccaaatagtgtactcgtatgatatttatatataaaggcaacactggttttggccaatatgagtaaggctattaccggttagttaagggacccaaacctgtatgaaaatatctgtctcccgtctcttttacctcaatctcacgtataacctaacaccaggtagggatatccatactgtataaatactgtggtcgggatatccaccctcgatagtggagcactaggtaggggacttggtgcttcaagtttttgacgagatgggtttcaagtggcgaactttctgatgacttcggctttaggagatacgacccaatcggagcgcgttctcttcaatggagcgggatcctcgttgtcttaaactttgtcaagacattgctagtgtggttttttcgacgagagatacttcaacggcttgggctctgggaaatatgacccgactagataacgtcgccaccaacaatttccatctaccaagattgactaacaacggttcgatatcgtcgaccacaagagttcacccgggctgattactttcaaatcaacgcaaaccaagactcaacaacctaaacctcgggaagactgcccttcacattggacggacatcggcactctcgagcaatcagagtcgagtacagagtactatgttgatctcccctgcaaacttgtcgtgcgcttgcatcctcccatctatcatcaagtcgaacacgacaacaactaatgcatattgtgtgttatggataaggcatgcttaatgatcttggattggtctcggtgaggcccaccatataactagtcttataccaaatcatacctcatatacgaaaggtgttctagataaggaaggaaactacttcaagttggaaactacaaggattattcggatcatatccatatgtatcttcctagttctacttgaaaaaagggatattcgtgggtataaatacaagatcccctagaagaagaggggacacacacgaatatatgccaacaaacacaaacatgagggacatgcctagatagacccaatctggagtcacagaggccgacatgagggatctagagctatcctctaacctcgtctagttaatattcaagtaagaagactaccctgtcgtctactacatgtggtgttccatgctgccacgtcgacgacgactaggtaggttagacccaaatattgtgctcatatgatcctgatgaataagagcaacaccggcttcgatcgacaggagtagagctattacctgacaatcaaggagcccaaacctatataaaaatacttgtctatatctcttttatctcaatttcgcttctacgttagcacgaacgatactcatatcatgcaaataccgtaatcacaatctactctgtcgacacatacctacgagtctactactgtaactgcgaatacaccgtatgacccgatccatgcacctattcggtaaaggacaaaaccaacgtgcttgtttggtggtcacttaccagaaacgtgcacatggacatccaggagacagacacgcatattacctgtagactgtagtatgtgtccaaaaaggtaattagtagactaattgatttcaattaatctaaaaatttcaaatatatattcggcatatatctacaaagatacataatattttatatatacaatttaccatacctattttcatatcaataatttattatgtttacatataacatatttttatacaatatctattgtgcaaatgctccctatattaggccgattaccatttaatactgagggcttactctattctttttgtatatatgacgcttgtttacggtatacataatacccgattcttaatccaaatatgctcattacatcctgacaatactagaagatttatacaattttctgagtatgtactcggctttctatgttatatatgttgcaatactagaagatttatacaattttctgagtatgtactcagctttctatgctatatattttgtcttatagaaaatattttttaggaatgatcgagcactctaatagccagaggtcgattacaccccgttgtcgagaacgttctcgaacaaacgtggacttgtcggaccaaacctaccaacaaataccggcggcctatctcacatttagtgccggtcacgacccagtttatttgtgaaaaggttgctacatacaatctcctcgcgagcattgtcagcttgatcacccggcatgattgcgaatggacatctgacatgcttataagttaggtatgtgatgtcatgttggccacatgaaaagcacatgtaataatcaactcaagcgctcctgcgaatggttgatgtatgactatacacctggtccgagtacaggcgtggtttaaaaagcgatcccaacacctctacgagttctccatgagtagttgagctatgactacacacctggtctgagtagccacatggtagcgatcccaccacctctaagagttctccacgagtagttgaggtacgactacacacttggtccgagtaccagcgtggtagcgatcccaccacctctaaaagttctctacgagtgatcaaggtatgactagagacctggtccgagtacctgcgtggtagcgatcccaccacctctacgagttctttacgagtggtcaaggtacaactacacacctggtccaattaccggcgtggtagcgatcccaccggagttctctgcgagtggttgaggaatattaaaataaggaatattggaaaaggagtctagagaccatatatgaatacaatttagaaataactaaaattaagaattaaaaataaggaatattgaaaaaaagagtttagaatccatatagaagtataatttataaataacaaaagttcggaattaaaaaaaataaggaatatgaatctagagtccatatagaaataaaatttataaataactgaaattcggaatttaaaaataataaatattgaaataagggtttagagtacatataggaataaaatttataaataacgaaacttcaaattaaaaaagaaggaatattggaagaggaatctagagtctatatagaaatataattaagttattacacatttgttaatctgatcaagttagtacagaacttaaaattatgttaccatttaatatattttattaataaaatgtgaaaatatatatgctattatgtgagaaaaatataataattctagccatgtaatctacgtggcctaacatgttacatgctagttatacagtgattcaaaacttttaatagaaatattggagttcttacactaaatcaaatcaaatcaaatcaagaattagaaaaaaagaggagaagtgagaggaggccaaggcattggggcatgggcggatccgggaaaaaaattgggggggctcaattacgcagttttttcaacctctagccatctagagacctttggtttatcatccatggtgaaaaaatcgaaaagggtgctgagggggtatccataggtcttgtgggtgtagtgagactcaagtccccctgcaggcacccacgttgaatccgcttctgcattagggggctgctgatccgcggctagtcgcgcggccgcgcacgtgcgcgatcagctggccccctctagtctctcttctcctatatactccctctgtttcacaatgtaagtcattctagtatttgccacattcatattgatggtaatgaatctagacatatatatctatctagatgggaaactattctaatccctcgaagcgatgtttcctcgtttgcttaaaaaccatttaaacggttatgaaaaattctggaaaaatttgacaacattcatacaacatatatatacaactccacaaaatcttaagtccaaactcaactcacacgtcgagatataaaaaagacaaattcagcatatgaatagtagcgtactgtttatatctaaatttgtcttttttgtttctcgatgtgtagttcaaatttgaacttgaattttggtgcactagtaggtatcattatactctacattgtcaatttttttcagattttttcataactatttacatcgaatttgaaagaaaaaggtatacgaggggatatcccctcgagggattagaatccactcccctatctagattcattaacatcaatatgaatatggcaaatgctagaatgacttacattgtgaaacggaggaagtactagtgtatatacgtatgcatatactatatacatacatataaattttgtatacgtaaatacaaaatttatatgtatgtatattgtatatacatacacactttaatgtataaaaatatacatatgtatacaaagtttgtgttcgtatgtataaaaaagtctaaaaaacacacttatacaaactttgtatacgtgtatataaactttgtatatgcatatactaagtttgagtgcgtacggataaaaacccaaaatatacacatatacaaactttgtatacgtatatacaaagtttatatacgtgtatataaagtttgtatacgcgtatataaagtttgtatgtgtatgtatacaaagttctataaatacgtattaaaaaaggcgaaaatactatggcccctttgaatcaaaggaattatgaaggaatttcataggattgaaatcttacaggaaattttcccatgtagccctttgattcaaaggttgaagttttccaaatcctacaaaattcctatggaatggcttgttgcatattggttttagaggaaacttagcaagaggtccaacctcttggtaaaaatcctttgagtctatctctctcatccgattcctgtattttaactatggtccaatcaaacgataattcctatgttttttctgtgttttgcaatcctctgttttacacttacattcctgtcagaatcctatatttttcctattcctccgtttttttattcctacgattcaaagggcgatacggaaagatgaaacagaaaaaaaaaggaaactgtaaaccgaaaaaaaaaaaaagaaaccgcgccgtccaccgccctcctctccgcacgccaccagtcgcgaattagccttctcgaaggaattgcctgttgggctgttggtccaaggccgaagggaggtgactaggtgaggcccggacgcggccggcgatgaccagtgaagacgccagcggccggcggaccggcgatgaggtccggcagatcaccagattggtaaatgcctaaatggccgatggcgtccacgtgggcgaccgggcaggagaggggagcagcgactaaatcatatgcagctctctgcaagtcggcattactctcctgaaggctaaaactgaggcgctctgtttctcttttccatctttaattcctctcaccatttcttctccacggttgaaatctcaagatggattgctagtagcgattattcgatgagcagagtcatactcctactgtttctgtactttgttcacccgaagatttatgacattcagtaaaatttacaattaaaagcagagagtggatcagctgctatttggatactggagctcctgtctaagcaagtagtagtatgaaacatcaagcatagcagaattgctaggcccaaaatggtgggaaattgctgtcgttccttcacaaatttactgtcctagaaccatctcaagattgcttctctctctctctgaaatcaatgtactctgcatgaacctgttgtgaattgaagatcattgtacacaaacagaggaattgaagactatacaactagaacagttcttattgaggtagcagcgtactttccatgaatgatgaatctatggtgaaaatcaagaacaataacaaagagaagccacttttggctacatctttagccctttacagaccatcgtacagagcgcgaaaatgctctgcaactcccttcagtttcactgctaaatgatacaaagaaaaccgaaataaacgagacatgtaaaccacagctaaatacagtgtagagatcgtgagcaaaagaataaaaatcacgaatggtaaaacaacgtatgggtcatcagatcgtttataacgtgttcatgcatcgaagaaattcaatgcaaaatatatatatgcaatttcaatttcttgggatcagaaggcggtgcagttctttgggaggccggtgacgtggtcgacggcgacgagctgcgtggcggcgcagccgatgacgtcctggcggagcttggcgccggcggccttgagcgccttgaaggagaccggctggttgaagaggttgagcacggggagcttggacgccggcggcatcctcccggcggggagcagcggcgagaagtcgtcggcgacgagcggcacctcgaagtccctcttgtcgtgcttgacgacgttgcccttggcgctgatgtgcgcgccgggctccatgtggttggtggagaagctgctctggtcggggaagttcgggtagagcgcgacgtagccacgcaggtacatcatgtcgatgaggaacttcttccaagacgcctgccagccattggtgcgggaccgaggtatctgaactggattctgcttggcatcctcggtgaacctcgccgccatgtacgcgtagaactcgcgccagtgcttggggaagaagacggcgccccagctgcagggaagctggtgaagatagggggtgttggggtggtggttcttgctgcggccgaagaacgcggtggcgttccagcgcggccgctccttgacgacctcgacgaggcgcggcgtgtagagggagatggaggagagctcagggagagagacctgggggtcgtagcggtaggcgaggagggcgtacttgatccagaggtagtagtagggggagacctcgatgtcgtcctcgaggaggaggccgtagtcgtcgtcggtcgccgggtaccagctctcgctcacggcgcggatcagcccgccctggatgatcctccgccgcagcgtcttgccgccgtgcggccagtcgaaggcgttgacgacgttcagcgtcgccgcgtccacgcggctgtccatgttgaagctgatcggcacctcgtcgccgacgtagtaggcgtcccgcagcgacgccagcagccgccgcagcgacttggcccggttctgcgtgatgatgttcaccgagatccgcatcctgttccagtctgcgtgaaatccatggattggttaggatctggattttcatccctcgatacactcgtggtttgcatgtcatctagattgttataaaaaaaataaaaaaaattgataacatagattaatattaaatatatcattccacaaacatgcaagaccaaatttaacttctataaattgcaacaaagataacaaattaaactgaaaatagttatcgcacattcgcaactatatctattatttttgttataacttatagaagttgaatttaaacttatgtgtttatggagtgatatatttcatattaatttatgttgctaattttttttatatattttttgatgactatttaggtgtattcacgaaaccaggggatatcccctcgaggtatgaattcactttcccgaatggttagagctttgatgtaatgcaacaatggcggattagagctttgaggtagaagaagcttactgggcagtgaggtggggcggaggttggccatccagagaaccttggagatggagttgcgggggaggaggacgagggcggtgcggttgacggcggcgtcggcggccatgcggagggcgtccttgatcttggagtcgacgtcggcgacggcgacgatgacgctcgggttgtgcatgcggacgatgccgcgcatgctggagtagacggcgtggaggacgggcacgtcggagtgggaggggccggagagcgcgccgacggcgaggtcgaagatcttgaagcgcctctccttgcacacaaccttgggccacttgagcaccgccgccgcctcctcgcaggggcagtggccgccgccggagacgacgaggtaggccttcctcccggcggtggtgcggaaccgctccagcagcggcgccagcgcgcggacctcgccgagcgagtgcgcgtagaagagcgcgtccaccttctgtgggtgcatcgccgcccactgcgtgacgtagccggaggtgagcgcgcgccaccactgctcgtcccgcacctgcacgatgtccttgaagatcaccgtcgtctccgccacgtacgcgaggcggtgctcgctgtccccccacgtctccttgtcgccggcgtcgacggggagcacgaacgacccggcgcccatgtacttctgcagctggtagctcaggtggagatcctcgccggtcatgaaggtgaaggggacctcgatgaagagcgccttgacgaggtcggcggcgaggaaccacgagctcgagaggaagtccacctgcacgatgcggtcgacggcgatgtcgtacgccgggtcggggaggtagaggccggcctccttggagcggaacttgcggtagctcgggaaggtgaagtccttctggcggaaggggaggatgcggccgatgctgccgagcacggcgttgcggtacttgtcggtgccggcgacatgggtgaggatctcgagcatgcgggcgcccgggatcatgtcgtcgtcgaggacgtagacgaagtcggactccgactgcagcgccatctggaagcggccgtagtacttgaagtcgtggccggaggagacgaagctgatgcgggagtcgttgtagctgccgacgatccggcggagcgccgcctcgttcgggctcccgaaggcgagcacccaggcgcggtggaacggcaccgtctgccgccggagcgtgtccagctgcgcgcacagcgtccgccgcttgaagtggttcaggatcaccgtcacccgcggctgattgccggcggcggcggcggcggcgctccaccgcgagcgcatccggaggagctccggcagcgtctcggcgccgaagctccggcgctggaagtcgcggacctcgtcgtagagctcgcgcttgaggcggatcatcacggcgtccgtcgacttcttctgctcgaagtcgatgctctcgtgctcgcacacctcctccggcgacaccgccatgccgccgccgccgccgtcgggctgcgccatgagctgcttccagtgctgcgcgatgcgcgtcgcccacgcgaagtccggcttggcgcggaggtccacggcggggctcatgtagtagagtaggaaggtggcgtagatggcgaacgcgagctggaggcacgtcagcgccgcgaccagccgcgacgagtgcctcgccgccgcgcgccccgccttcccgccgcccttgccgccgccgacgaactcgcccagcatcccctccagtgcgtcattcttcacgatgtgcgcgcgggtgacgcccatggtggtggcgggaactcgctcgcgccaccccgcctgatcgatcggtttaaattctttcgcaacgtctctactagtgtgcactttgtggcgggaaatcaactgaaagagagaaaaaaaaaagcgttcaacgatcaactgtgtgagatgaaatgtattagaaatctctactagtactacttttgacttgatgagtatataagctacacgatgaattacttactctgaatctaagagatgcagtaagaattcagtaaagtggattacatgattcagaacacacaagcaacctgtatatgacttgccttaggttatttgtatatgcagctagctagttgtagcctgatgactgctagtacaagacacgagaacaaaaaaaaaagaaaaaaaaagatacttagtggcatgttactatgaagttcagagaaattgtttgctattaccttcaggaaatgaaacgccagaaacaacgtaattaactcttcagattgagctgatacatgcagaattcagcagaagcattgcaggatcagaataagcagcagttactgcatcagagtgcagtgcagcagcagacgaatgaatgaatgaacatcagatgaatcagagattcagagaaaggaagatacaggagagtcgagcacagaggaatgcagtgcaggtagatatgatcgttcatggactggactctaggttgcaatgcatcatgtgcctcctttttataagctagtaataagggcaccgtcgatgctgcactgcaaagttcagaattggttccgaagcaaatcaaactgtaatcacttggtgctgtcagaagcttagagtgagaggaaggaggaatgtgaacactaggcacgacgatggcgagtgtcaacgaagcgagagctacatgctctctgcacaaaatgctctcaacatcacaggaaatattcagacaaaactaagctaagaaaaccaagcatgcattggcttaattagtatagtatgcgctctgccggacagcgtcaaaagccaacttttgcatccgaagattatggctgtaaaatgtggttttttaaaattttgttctcaaattactagaatgatcgaactctggcacgttggatgatgtgaataaagggtttgcattttgcaaacaaagctaacagagggaacagacaaagaaccagcaagttcccaagaaatggcctttgatctgaaggatttatgcttcagtcaagcctaattaccggaatcacgagtaattaacagtgatcatagaactaataacgggacacagttcccaatgctgcagtgatctgcaaaatgtcaacacacgtagcgtgaaccctggttaaaccaccatgggcaatgcaagccagatgacaagtttattatgggttaaagctaaagcaggatgagtcactcggagagacgaaggaagcaagaaaaggaggaaaaggggcacagcgagaatgcagctaatccaagcgagaggcgtcgtatcgccattagagcacgcagagaccaccggcattcgtggatctcgcgacacctacaaaccaagagcattcgcacatgcattcacgccaacattgcaatcgagtttgctgcagtttgagggcaaagatgcacagttcatccgaagaagcaatcctgctcgttttctgagcccagggcaatgtactgtactgtactgtatgtcagcaactctgaatcactgtacaaaaactgaaaacaatgctgtgctctgtctagagattcagattctatagtgtgcattgcacctcacaaaatgcactgtactagtattcagagttttgcagacatttgtatctggtggaattattattggccgactaattagtcattagaatatgctgttacaacctattaccaagattacgcttgctgcaaacctgtaggttaaaacccctggtgaattcactgctcaatgtccttcagtgcaagcaacagttaacaatttgtgttcctcttaactgtgggtggtcagactttttcagggccaatcattttgattttttgagttcaaacaccgtctgcaatcgtcttctgatttctttttccagagcaagcaagggaccctgcgtttttaggtcaaacttgcatcacaaatatggtagtactagcgatacagctcaaccggagctttttctctgcttccgaaagaatggtgccatggccatttcgttaagctttaggcctccatgatgcaagggtcggagtcttgattttgactagggtggatgactgacctgtgttcttatacttgggtaatgagacataagtgtacaagaatcactttcacttttgctgattataagctctaacggcttattaacaacttaaaaataatttatgaataaaacttttataaatatgttattagcaatttaaaaggcaaataatacttcatatgttccaaaaataaaccgacttttatatatgaattttgatatagatgtataaaggttggtttattttaaaacagagaaaattaaaaaaaaaaactaagatgaaaactcctaaaatcaacatcgaaactaaattttaaaatttaatttttggttacggctataagctgaaaggtaatcgatggaagtgattaagccaatattatcacgcagaggttactgcaactcgttggcgtacaaagctcgatatttaaccagttttgactttagaggcgtcggcttgtggtgaccgcgggattctcaaaagaagaaacggaaaccttggccacgagattttgtagctaggacgctagtagcgtgagcaaagtcaaaatgacttataaattctcgaccgtgcatgcgccaatgcatacacgttttgatgccacctgatgacctgaacctcacatacagctggttaaatgacatgcgacaattgctgctcctgggacacgttttacaaacttcaagattcgacttaagattcaagtacttaactggttaggttgcagtttttgtaagaatcccagccaaataaaaagaactcacaaaattcttcgtttcattatggtcagatacaaagttgctgtgtcaataatggagatacaaagttgctgtgtcaacagtggcttgtgtgaccacgcatcagaacagaaaagaggcgacagtagagatgggccattcctgtagttccaaagttcggacgagcaaaaatatactactatttgcagactgacgggtgacatctgacacaaaaactgcaggtctgcacctcaaaatgtgacgacataaaaagaaaggaagatagcttgaacaaaatggtacagcctttttattgtcaagccagcaagaacgctgaaacaatcacaatgtttactgaaaaaaaaacatcctatagagaattatacagctacattgatgattatagtattaaggctttgcatccaacacaacacagtagttgtagcattgcccccgttcacatgtcatatatttagtagatacaatatccaacatggataggaaaagaatagtgatgaaaaattataaccccccccccccacccaaaacaaaagaaaccatacataaagaaaatccaggtgaccaaaatccaaacgcctcctaaactgtttctcaacccctcactgagtatcgcattgtacagtataatctcacctgtacccaccatatggttgctgccctccgtatccggtacccattggattatatccactacctggacccattcccataggaggccgcatgttcattcccataccctggttcatccccatgcccatgttcattcccattggttgttggttcatccccattcccatggcctgttggttcatccccattcccatggcctgttggttcatccccattcccatacccatttgttggttcattcccattcccatgcccattggccggttcattcccattccaccaccgtaaccggaaccagcagcgcccatacccatgccaatgcccctgcttgcacccattgggttggctggaggtgccatggcactcgcacctgcccgaccgatgccggagccagttcccatggctttgcccatagtgatcgtagataccacaggagcttgagagactttcttttcttgccttttctccttgcgattgattgaatcgaagtcaactccaatatcagcgtgcggattagcctttgctgtaaaacagacataagattacgtcagatcacaaaagtacaaaagtacaagtgtagaagacagccagagagaagccacttacgtccagagatgtccagattgactaaacctcggctcaatgtatcagcccaaactgtagatttggactcaaatttcttcactggctcagactgactaacttgcaaggctgaaaggattgtttcagggggagctgatgaacttgattgtaatggaaagttcacaccagaaggcattgaattcggcactgcaagaggctgagatgcccctcgagaaattgatgttgcctgtgaagctgccatggcagtttgtggggggaaggttggctgagagggctgtagatttgttggagctgcaaattgagaagcctgtgaagggatgtaggatggtgctccattctgtgaaggagccccagacatgccattaatgccagtccctggaactggttgcataaaatagtttgattggcctgatggtacaggttgaggcatttgtaaaggagcaaatggtgtggcaacattctgagggattgtagatggattagtggctgcaggatgagatgcttgtgaatgaggaaatgtggaggcagcctgaggatagggtgcccctgcttgaggtgcttgagaagcaaatgaagtgggaggtgcttgagaagcaaatgaagcgggagcagcatgagtttgtggaccagcagctgcaggctgaggtgcctgggaggagacataagatgggactgcctgttcagggtgcacagatgggtttgcaggtggtacctctgaatgtgatgaggtgggcacaaaaatatcttgctgcccgggtgcagcattcgatccaaaagagaggtcgccaagagtgtctccaaaaccaaagcttgctgctgaagcaggctggaaaggatttgcatctgcagcaggttcagtagcatggaaagaaccagcaggtgcagcatttgtctgagaaactgcaggagtttcttcatgaacagccttgaaaggcgtaggatccccaaaaggattagttgcatcaaaggcctgcaaggtcaaaatccaaaaggataagatgaacaggtggttggatttaactaccagacaaggcaaattccaatcaaataaacatagaacaacacaaccatcccatcaccaaaacaagtatcttgatgttaattcaaaaagtttgtactgaccacaattctgtgaccactactgctgctgtttaaatacatttaagaaacaacatgatttaaataaagttttgtcctatagtgtgtgtcactttgtcgcgtgcaattattcaagcccacaaaatcatagaactacaattcagtataacagatccatgccaccattagaacatgagattagtatcgtgaatggccttatgttcaatagacgcgtacctcattgaatccagtagaagccggtggcatgcccataaaactgttactctcaaatcctggatttgctgatggctcaacatttgggctggcagttggctgaggcacagataccaaagccaacgaattaataggatctggtccgaataaatccatttccaagctattcacggcttgtgaggggttcactggaggtgaggtatctgacatgggatgcaaatattgaaaaaaaaaatcagtactcaattactaccaaaagatattgatactagtataatgccagaataggggtcattccttctacagttctcttcataaatgtatcagaaaataatattgtgtgatgctttctattaatgtgggcttttggttcatatgcaatgcaatgtgtcaaaaaaggaggaaaatatacctggtactgatccacgaggatcaaactcgtcaaacccattaacttcaggatgagtaggtggtggtgcaggtacgtcttccacagtattatcatgtacaccattcacctgacctgggggtacacttgttcttggaggtgaagacacctttgctgcagcaactggcacaggcacagtccctccatttctgatattgaacggtagttcagaaatcagagatcgttgtcatgtctactgatcaaacattataacataaaatacataccgtccatcatgattattatcctgtgtatctcttgtgacatcttcatagtttggcggtggtgaagcaatctgctggttagaaggcttccgctccatgggcctaccgaaggaggtacagaacataagataaattgctcaaataagacaagttaatatgttatgaacttagcatttctccatcatttacctctcatcctgagtaggtccgtcagcattgctttgccggccactgtgatggaaaaatgtatgtaagttagggtccataaagaaccataaataaccaagtgaatattagcaacttaatgaaataacaatcttataggctgcttattgactgctatatgaacgtgtaaaaatttaaatccagaaaaaaacaatgaaacggaccgggatgaataagcttcatcatccccatatgaatccctatctcgtccatagctcctgcgacctgatccttctgcatattcatggttgctatgacttcctttgtactcatcttctctatctctgctgtagcgctgctcattagaatccctagaataacgatctccttcccgattgggagtagttccagcaacaccatatctgtcatcatccctatatccatactctctttctcccccgtagccatttctgttatcatacctactgccatagcttccttcatagcggtcattgtcatagccacctgggctcctgtgtgttccactggtggcgaatgcactccggtatcttcagatgaacacataaaagtagtcaataaaacagagaatatgcatgtccacaaaacacaatgtaccaatataacgaaaagcaagcacactcacttgtccctggtagcaagtgctttctgcctaacttcctgtatcctctctttgtcattaactaaactaacaaggctctgggatttccgccgtacattgctaccttgatctctcccactcgaatcgatatactggaaatcagctagtgtctgcaattataataacaaagttaatgagcatcaagcaactaagatactgacgaaacttgaggcagaaactacatggagtatatgaaacagaaaatagatttccagcaataccgatatctgataagaatgttcccttatgtcatcaataactcgctctgtaccatgagcaaccaagtaatccaggacaatcaatccctacatatcaagcatagtatagcatcagaataaactgccctacatattgctgtggctatttccacttacatccataaaaggagagaacactgaaggttaaggggtaaaagcaaataagaaaacacaccttataaacatgccgccaatttttaccagtgtcattgatcctcttccacacaacattcatgaccatctggtactcatggctgcaagcacgcaaagggcattggcaccgggaaaattaggttttgtttgttacaaaggtgatcaaataacaaaagcccaagaagaaaacatactaattttgtgttgcttgggcgatttctgccaagagtgatccatgtgggccccatggctcgttgcttgtggcatcaagaatctgtatgaggccatcgagcaaaatggaataagtctgatgtcactgattatgcttcatgaaaattgaaaggcgagcaatccattaaattcagtaactatcatgcttaacacatgcttttgcgtgagggagcagcagagatctctgttaccttttgttctataccaggcaccttgaggaccttcttgttcacctctctttttctgcaaaaacaaagaccagaacagattaaattacgacagaaatatattgtatcaagcaaacgaacggagctcgaactgcacacggtatacgataagatggcaggtgaatcacgtacaggtcccggactgtttgatcgaatactttcttcatggcgcccttccttgagaatctagcttgttctgctcagctctctcctcctcctcctcctcggtgcaagcccctgtataaaattcgtccataagatccaaaaaagcatcatcactaacattctcccgtagcttcgaagcatcacggagcatccaacccaatagcccgcaaaggtaaagctcgaaaccaaaacaatttgaacaacaaaagcagcggaatccggcgcgagcaacgggaccagatctaacgcggcggcgatcgtacagctccccgccccagatctagcatccgccgaccgcctcggatcccccccacgagatctggccgtgccattccgttagctcacgctcaccaaacacggcgcggggatctgacggcgcccgaaacgaacgcaaaaaaaggcgaatccaacaagacggcgaacctgaggagaaggcagagcagatcggcgggggcagggcggcgccgctcgccgtgcccggctcgcgcggcggcgggagggggaggagtccaaggggattccacgcgagggaaatcggagaaggcgagggggggggaaatggagtttctcctcgatctcctccgctttcctctcgcgctcgtgtcgcgtcgcgtcctcccttcttccctgcgctgtcgtcgctgggtcggcgggtggccgcgattgaggacgagttggggtcgtgatggatgcgcgaatattattatttctctcctttttttttcggtggtttggtgtctcctgattaggtttattgactgattagcaagttcgtgacgcgggattagtcgagatctagtactggtattattttttgcgtattttggtggtagttttttttttcttcgaatagcgaatgagctggagctgagaaagggaaagcatatgagagtaagtttaataatataaccaactattagctccaattcatttatagctgatctaatagctaagttagctataatcatatattacaccattaatatatggtctcacctcttatacactcacgtgttattagagtctgtacagtattagagtctgtgctacaactggctaccaatatatagattgttttccttctcttctcttctcttctcttctcttctctttttcacatgtgtttacagctgacttgtaacatgttagtgtaggggttcctattattttatttatttactttgttgtatgttatgttaatgtgcttttaatagattgtaataattgtattgctaagtggtgcatggttaaaccttgctgtgtttagttggggaaaagaaaattttgggtgtcacatcggacgtttgatcggatgttggaaggggttttcggacacgaatgaaaaaactaatttcagaactcgccgggaaaccgcgagacgaatcttttgagcctaattaagccgtcattagcacatgtgggttactgtagcacttatggctaatcacgggctaattaggctcaaaagattcgtctcgctatttcccccgtaactgtgcaattagtttttctttttatttatatttaatactcatacatgtgtccaaatattcgatgtaatgttttttggaaaaactttttgggaactaaacggccccttgctggatgacagctgggacccctgggaataaagcccgcatattgagacggtgtcaactgacaaacacgttgaacgctccttccttctagagaatgcccatacctttcacattccgcgttgtgtgtgtgttttctttttttttttttactttcaactgttgaaaccttaaccgtttttctgccacccaaaaaagacctttctattgtgtgttctttgtgcatgctttgcacagctactttgtttttttgctcctccactgtatcttgtcgttgctaggtcaaaacatttggtatatctgaaaattacagccccaaaggatccaggaaattcaagaagggtggtagatgatgtgaaattttaaaaacaccaaataaatttgttagggaaaacataaaaatcgttctatccaaaaatgatattccaaaaaaataataagataaataattatagtgagtgcaataaactttttttgtgtcatatgctccttgactttttcagggattttcatggatgggaataacttttttttcaggtttgtacctttctctcctcaacaagaaatggaaaatgttgaaagaaattgagccgcaccgtcaaccgagctagtaaccgacagttggccatcttctcctcgtggatctaagctggccatctcgttgtgaaccacacagatctgcaccccccctcatgtgaacccccatataaacaccaaacaaacttcggttggcttcgaacgggacctgatgctatgctcgtacacctatcgtcctttgttaattaggcctctttctttatttattaaactagcaaaaatacgtattgcgttaactggcaaaaatacgtattgcgttacaaagacaatttttacgattgatacaaactctgccaatttagattataaatcgaaacaaaacaaacaaaacagtagcaaaacaaagtcaaatcatatatagcattaaaccctgttgtgctcacttcgtgtgttatcgtacgtttttcaaactgctaacgtgtgtattccataaaagcattttatatagaaatcactttaaaatatcagataaattactttttaaaatttataataattaaaagagtaaagaccatcaccggtccttaaacttgtaccactgtgtcatcgcggtccctaaactcacaaatcgatcgttccggttctcaaacttgttcaactgtgtcatcccggtcactaaaattgcagatcactcgtttagattctccaacttgttcagttgtgtcacctcggtccctaaacttagatttgaatatcatctgggtcaaataggacagtctaaagactttgtatttaaaaataattcataacttttttatgtgaactctaataaagacaaactttatatcaaacttgtagccctcaacgagatctacaactttatagttgattttttttattttaagtcatttttttgtcccaaaatgtaattttaaaattaaaatttcaaaatctataaaaatgcaacaatattttgggaccctaaacagttttaattcaaaaacttatcaactacaaagttgtaggtcgcgtcgagggctataattttaatataaagtttgtcttcattagagtttacataaaaaagttatgaattatttttgatataaagcttttagaccgtcctgcttagggaccggggtgacacaactgaacaagttggaggacctaaacgagtgatctgcaagtttagggacctggatgacacagtcgaacaagtttaaggatctgaacggtcgatttgtgagtttagtgaccgggatgacacagcggtaccagtttagggaccggtgatggactttactctaattaaaacttaattaatcatgtactaattaaagcatttcgtacctcactcgtttcattttcctttttctataagagttccgtacctgcaaaccttttgcaccgacggatgttgacggcatgattaaagcatagaatcctactgtaacactaacagaggagtattactgatcccatgttgttagtgggctgatgtagcgataagaaaagcactggatgctatgctatgcccatatggctgtgtcgtgcttgtactagtagcagccgggggttacgtgcgggcgtgtggcactctcgtttttttagtggtaatccacgaaaggtgacgagcgagtagtggtggcgattagggatgaaaacggagcggatatggacggataatgcttataccatattcgttttcatattttttaccggatacgaaaacgaatacggatagctcgaatacggaaacaaatacggattatctcgaatacgaataagaatcgaatatgatcggacacgaatacggaaacaaatttttctcggaacacgaaaaccaactcaacttctaatagaaataaatttcaacatatataattagctcattttatataaaatgaggtataatttataaatatttttttaaatttaaataatattaatagtatggactagtgttaagagataaactattattaaaatctataaaggtacattgaaggttatagagttagaaagaaatggggtatgtctcatgggtcctgcggatatccgaatagcactattcaccggatatctgaattattatccgtattcgacggaaactctgataccatattcgtattcgtatccgggagaaaatatccgtattcgtatctgtatccgaaatatccgagaattatccgatccgaaaggtatccgtatccgtttttgtccggagcggacggaaactatccgctccgttttcatccctagtggcgatgatgtgctggttgcactgttaacaaatgatgattttggcatcgttttcgctttgaacgctggcaggcggcggaggaagaccggctacaccagattcaaatgaaactaaaaaaaattgtataaataatataccagtcgacagtgaaacattcgtattgacatcgtcaatttaaagatatgccggtcaaatagtttggatgtgttcctaacggtagggcgtgcttgtgtctttatatgggtgagtgtacgcggttatcaacgtttgcgttcatattatgttttttttaagaaaaggaaaatgaataaactatactatattagtaatagtgttcgaatcagggtgaaccgttccagagccaaaaaatggaatatcaactattgtctcggagttaatgaaaattgtttcaaaacaatagaccctcgacaatattcgaacatcttttaattaaaaaaccagtttattttttaaaaaaattaatcgaaaaatcaaactgtcggtttgtgttccggtttttggcaaaccgagctgttcctgacggtaggcggtgcgtagtacgtatcgatcagcgctagcgcttgcgtttgcgtttgggtcggtcgctatcggagattggcggagcgtagctacctgaccgaccggatcagcagcagcagcacagcaaacacaagcacggtcgtagttgagccattcacgtcaaccccgcccaccaccaaccgccacgccaacgtccctttcctttccatcacgcaggcccaaacacatttcggcccaacaactcctcctccctggcccaaacagaatgggccgcacgcaatacagatccttgctaccgaactcacatgggccagccgcacgtaagtcgggccaaccaaaatgaaccgcatgcaggccaaaatccatggaataagtttacttttggtccctagttgaggtcatgtttaagttgcacatatccttcaaacacaataccaggtatcctcgacgccaactcttttggatcccattcaactcgtcccattcaactcttttgtataccgtcctacaatctcgggtataccggtattgcagttgagagacacgttatacaaattcaaactcgacgtaagatgaggtatctgaagtaaacttattgcaaatccctaccctcgaaagtattcatcccgttcttgggccgcaccaaaatgctggaaaccggcacgtttcctggcggcgcggcgcaggcggtggccgacggcgatcgcccgccgccgcgtggtttcggcggtgcccgaatcggcagatcgagctggagaaacgccgctccgtggccggcggtggagggcggctgcgatctatcaacgatcggtcaagcatttcaaggtgccaattcctccgcagattccccaattttcctttctcttctctcgccatatcgagtacacttccaccatcacagaataagttaatctagtgctggatatgatatattctagtactagatgtgatatattctatagaataagttaatctagtactagatgtgatgtgatatattctaagtgctgcgaatctaaacaggatgaaggtagtacatgctaagatgctagtgttgcccatttgctccaccaaattatttcatctatatcaactgggagaattttttttcctcatcaatacaacttcatctaccaaccgattcccagctgatgattgtccaaactcctgatgctgaagatgccaactggatcatccctaccagttccaccaagccaacaaatcaaagcaaagcgtcataccaagatgacaacatgcagcagcatcaccagcagatgcaaacggaaacaaaacagaacacaagaggccatgatcagaattttcaatttccaggaagaggcaagccaagccttgcaaaaggattaggtatccatccccatcctcaaccacattccagttcacaaatgtatacccttctctttatgtacatcaccacacaaaggagagaggagagctactagtacaatactgggagtataccaggtaaccaacaagaaggaaaaaaaaaataatagccaccctatcttaccccatttccccaactcttataccatccttctcccaaatacagattctttttcccttttacccccaccacacccaaattaatttacaccgttaaaatcccccttataccacacaaactatacccccgtcccgtcctcccgccacaaaaccaagaattcaactgacactactactttcaccaaattcacatctaggctttagcaaaacccatccttattggcgttgccaaacactagaaattgcagttacctaggctgcgggcgcgctggaaacgacttcacatgcctcatctgtggaggggttgaggagcggctcattgtctgcgagcgcagcagcatgtcgaccatggatgaagtctggtaggcctggattaggctctcgctgtctgtggagtcacctcgcgcagttgctctctgccatgagtgtgagctcaagccggagaggacataggcgcggcctgatgcttcgtacctttggcgattggccatcctttcttgcatctccttcagctcagcatccaatgcttggcacaaccgatcaccggattgtcctgatgttgaccccatgatcatcctccggcagtcttcgagtaaggaaacagcatgtgtcaggtcaccacgctcggcagacaaccttgcttcagccatgacttcagctgcatgaagacggttcttttgtcggtccacctcgattgacacgctttgtactgagacgaatgctggtctagagatcttgacttgcacatcagccatattgatagtctccttcatcagtggatctttgtagacacagccaactttgagaagtgctgtttcaccgtaacctgggggaacatttactgacataaggaaatccctctcctcttcggcatacatgtcaccaacatctatggagccattcctcttgtcatctgcaagtctgctagaatagcttcctgatctgatcgagccaaagtgtacatcagggtggaggctctccacctttacatgcaaatcctgtgcaacaacactcaagagtccaccaatacactgggcaaatgcatcttggatggcagcctctgtctctatgaatgaaaaggtgcccccggaggtttgtgagattgaatgcagcgagactgaatcatggtcagcaccaaatccaaagacatgaactggtacctgttgacaaccattactagtatatggcaggagtgagcagtactctggtgctgctttgtgtacaccagcggttggtgagactgtatatgtatcttgcccatctgatagtaggatgatgctgcacactggattcttggcctgtcgatcttcaatcactttggagcctttcctcaggccctcagcaatattggtcccaccatttgatgtcagtgaataaacagcttgcaagctttgctgacgaccagtctcagtcatccgacggagggggaagagtctacgtgcagatgatgagaaggcaattacagaaagccgatctgaggagccaaggttctgaatgacaaatcccatggctcttttcagcaatgcaagtttggtaccagccatgctcccactgacatcaagcactgtgatgagatcaacaggggctcgagttgtgcccaagctattgccatcttcaagtttgctgcttgtttgcaaagtctgagcaaggggtgcctttagatgaactaggactgtaaaatttctttctgaagtactttctggaacttcagtgaactcaggatatgtctttatttccactgttcttaaacacccctgctgcgagccttcatttgcttcagacagtgagtccaagggttcatcatcgttaaaaatactacggtcagtgtcaggcaacaacgatgtcatatgatgcagccgaccagaagaacgagcacggggaagtggtcgcagtatggtcatctgcccgccattttggtgcccattaactggattaatccttgcacttccttgaggaaattcaccaggcaagggacctcgaaatgggagttccttccacttggtgcggcaaactgggcaattgttgcttccatgcttaacatttgcagctatacaatggaagtgaaaggtatgtgagcactctgctgtgaatagagcatggccctgaccaggcttcattgtggtcaaacatatcgcacatgttttctggaagaaaaaagaaggtacagtgagattataaaatgaacagtggtcaaacatgaaacttgaagtggttagcatgcatgcttccatggtatacaatacatgcttatcagtgatgctgcaaagaaagcaaacgagcatctagagacagcaagattaaagggataattcatgaagatgatgctgtgataatctctaatcaggtactaaatactagcatacttagtttatttatatttattgaagcggtcattctataatatataatagagatattacgaataattaacaacacaaagcagcaacatcaagaatgccaaagaactaaagcataggcagaaacgtgtaggcatgtagttggacctttacacacttgtcgtcttctatttttcataaatattttttcacaatgatgaaaaagtccagagttttttttttatccccaaagagatattcatcccaaaccttggtcagacgccgtagtttcagactcttttttcagaacaaacttgctaagagaattgcaatacaatttgtctcggagaaaaaacatcaatcattagtcatgtggcaagttgcagtccatggtcaagctaattttacaaatggaagaaacaatctttagcattatcgagtgaggtaggtggcttaatccgaattagtcattgctgactaactaacacacctcaccctctataacagaagattaaatggttgaccagtgaccacccacagacatttgaaaaacacgactctaatagcgtgtccctgttcagtttcagtacactggtttggtataattagctaggctgctgcaattttaacatttgcaaactggcatcttctgaatataggttcattttgcaattttaacatttgcaaactggcaccttctgaatataggtttccttttgcaattctgggctcttaaagcgagacgggtggtgggctctgcagttttaagttggaacagcaagagaacgcagaagggatctgagaacagtgtggaacagtgtccactccaagctgttctgaaaagaggatgctatggctatggcactgacctcttctttatgcctcctccacgaaaaggagtgaagtgagaggaggctagaggaaagggcagagaaaagtgagtgatgaagaaaagaggtgtggactatggaggaggagagtagtagtatagtcagtagtgagagtggagctgcaagagagtagaggaggaccccatcgttaaagaaagacaaactcccccacttcatgattatattcctcctccaccattgccctctgcccatcttctcctgcatctccttttctcctcttgagctcctcttttttatcttctctctgtgtttgtgtgtgtgtgtgtgtgtgcgtgtgatgaaatcatgaaagcaaagctacttgcacagttgcatgcatcatgtgtggcaaaaaagaacatccatcacaggtgtacaacctgaatcagaacttgctacaataattactggaactgaaatcaaccgagcaggcataaatcgagagaaaaaaaaggaattaatttgtgacttttgtgtgcatatggatggatcttggctgtaattttgcttgcaaagttgcaagcttcttttctctttttttttatgcttcatacatagagatgtgaaggatgtgaaggagggactgtaccttgaaggatttgctgccggatttggagaggcgaagtccggcggaggtcggcgtcggggtggtcggcatgagcgcgccggcgcccttgaccctctgctccgccgtgggcgtggtgttggcgctggtcgccgccgacgacgaggacgccaccggcgacaccagcgccgccgtggacgacccggtggacggcgagtcgccgtcgtccagcgtcctgggcacgtagacgcagaggttgagccccagcgacatcttggccttcctccatctgctctccatcctcactctctctctcaactactgctactacctctaccacccctctccgatctgagctgagcttgagcttaagctacttgtaggtaggtgggtcgctggcaaccgccgccatggatgggaggaagcagcagagcacagagctagtaggagcttagtagattgggaaatcaagaaagagacgatgtaaagaaagaaatgaagagagaaaagaaagaggagtgtgtatcgatggctatttgacctcaactcccaagctccaccaaccaaccaagcaagctgaagagtgatgatgatgagtgacaagagagagagaagaagaacaagaagaggtgaggagagagagagagagagagagagagagagagagagagggagttgtgagtgagggagcagccttttaagaaagagaaaagcagcgagcgagcaaagcacagggcgcctatggcgagggggaaaaaagaaagaagaagggcttggaaagaaggagatgatggcgagcagtgaagaagtaagtggagacctcagctcagctcggctcaaagcccaacctgccaagctgtggcctgtggcctgtgggtggtggcgctgtacactggccactggcacagtatgtgtaagggaaaaaacacacaaaaaaactgtaattaagccaaaaaaaaagagaaagaagagtttcttgtgatttttcttgctcgattttttatttctttatttcttttttttttgtgagagaggctctactacttctttccgacaagcggagctagatctctggcttgctttgtctgcctatctgctgctgtctgcctcctctgcctctcaacttattttcgggtgtgttccgttttgtttccttctttttattctcccgatgattaaaggggaaaaaaagaggagtgtgtcaatttcttttgtttttttttgcctttcctgtttaattgctggtgcttttttttctcgtcactgatttcctcgtgtcgccgttgatgggcacaagcatttactgatataattggcgagttgctgtagtgtattcttaccactagttcattccaatgtcatttgttgggtatactagttacttacttccttggtctaaacaaacgaatataaaactgaatatgacatatcttagtataatgaatctgaacagacatatgtccgaatttattatattaggatgtgtcacattcattactaaattggttttttatgggacggatgaagtacaaatgatgcttttaatttatctaaaaaatcataaaggaaaaaaacctgtggtttaagtttgtattgcccttgcaggtgttaaacgaatgtttgatacatccagtccagggaagcagaatgacacctttatagagctgaaccttaaaacatgtcccaaaatagtatcccaagtccggaagtcccaaaccaggagcaaaaaagcaagggccagagagagagaagagatgaaggggagaaaaaaaaagaataagtgagcaaatagtcatagaaaagcaggctgtgactttatataaaggagggaatgagagcaaatgcatggagtatcagtagtaggagtaatctattgtggtgtgggcggtcacttttgcttgccctgctgtgatgtctgtgagtctgtccttgagcactgatgaggtcaactgcaactttgctggtactactcgtaaaagaatagtctactccatatttgagagcttaagatgctaattacaatttgcatgcattaaccagaagaaagcatgtgccattggtgttgtcatgaaaatgaggagcaacagtactggtgatttggattgtacaggcgaaacagtaacagcaaggctaatagtatagcccgctgtgggctaatagtccagggctaaagccaactactagtacaatagattgtctattgactgactgtatctcataatcaaacaattaattatgacatgcacatatcaatatatatgatcaagagtgaattgtattattgtagctatttgtgttgtgagataaactttgttcaccaaacaccaggatcatagcacagatcatactaaccaatttctctggagtactaaaagtacaaagcacgtgtttgttggcaagaagagctcgtgaggaaggagtggatttcctgtgctgattttcgtcaaacgatgtggcatcagagtttttcacggcacagttttcgctcacgatcgcgtggatggaagacgaagcacgcagaaggtgatgagatcgcgcacgaacggcggagatggatttgcacaccgctgggggaaggggatcgtgcgccgcggggtagccagttctcacgggatcgtctgaggacgtgcaggccccacaaacagcgtttttagcgccagggtcggctgcacacgaccgatactgcgtggagaaaaatgctaacgccggacgacaatttagtcgtccgcttcgttctctctcatctacataggaaattgatgatgtggtactattttgtagcccgcttagtcagctgttgtacctgcctgtaatggtatagtacatctccatgtactgtagagactggagagtacgtataggctgcaaagacgcagtaattaaatctgcttgcaatacgtaggggggtaggaccagagcagtgcattgcatgtctgcatctgcagctggcagcgtggaaacggacaaggccggaatatttagtttgttgccaaattttgggaactatataagaaatcctgccaaaattttgataagttgtcaaaattttaacaactatattaaaattttagtattaacaaaatttagtaaggtttttttcgcatgaaagtaaacgtaccctatgtatctcgacgcagcagcccagccgtgttgtgtttatgttaatcgtgttgtcaattcgacccctgatcaagccatggacccccgcccgctgcgtccgtgccgcatcgcaccgcacggtttacgatggataccgcaactgtagcggcgttgcgttgtcagagcggttacaaataatgaacggtaggagattcaacaggattaatttttcctgagctgaaggagagaagggaagagagatagaatgggcgggtgactaattagagcaagtttaatagtgtagtctattactagcttcaaatcatatatagctaatataatagtcaatttatataatagttgcttactatgctattaatacctggtcccacctgttatacacatattacattttggagtctgtgctgcagctggctacagatctgtagcccgctgctcttatctctcttcatttatctttttaaaatatatttatagctagcttatagcctgctattgtacctgctcttagccgtccagctatatgctcgacccgaggttgtggggcccgcagtaactagcgatggcagtgaataaccgaataagagctatcatcctcgcgcgtacgtcccatcgccctcactcgtagccaccgtcatcgcccacagctgtcctgtcgtcgtcgcccacctccgccacagccgacgtactcgtcctccgcggcatctagcgtcgcacgcatccctcctgccgtcctcgtccttcgcggatgtcgtcgtcatccacttccatccccccgtcctcgcccacatccgctcgtgttcgtcgtccttgtcctctgtgactaccgccatagcttgtgtccactagattgtgttgttgcccttcgcctacatcctctatggacgccgtcaccaccttcacatgcgtcttccgtggacgctgccgttgtcgcccggtgtccgctgcaacggtcgccatctcactcgccctcacccacgtctatgttgccccgtcctcactggcaagaaacgagaagaacgagaactccgagaaagaaagagaactctgaaaagagggaaaagatggtgggtccataaaacaataaaatatttatgatatagtaagtctatataatatatcttaactataatgctttaattcagatgatgtgtacacccattgcagccgatagtgggctttgttattgaccttgctctgagagagcaaaacaggcaggggcagcgcagcgcggtgacaatgtagtgcatgcagcgggcgtcctgtggatttttgcacatggtgggtggtgatggcctgggagtagggtttaacttatcgattttaaagtaaaaaactgttcctcaccggttggctaaaaaccggtaacttttaatcaatgtcatgaaaaaaaaacctattaatatagaccggttttcacaaaccaagagctaacggtttcacgaaagccgactaattctgtgcgaccgtacatcataaaaattggatataaacttatagctaatttattatacatgttaactcttaagttgacttagaacaactactccccccgttccataatataagggattctggagagatgcaacatattattatgtctagattcgttgtactgtgatatgttctgaaatcctttagttttacaattaaatttgctctaatatttaagggcaagagcatttaaatcccggtgggccaacactccatgcgatgttttcgggtgctttcacgacaccgtctatatattaacgcatgttagagcgtggaatctgccacagataattgaaaaaagcgccgtcgatcgtttcattggatctgaattagcgcacgcccccatctaccatatcatatcccaccgcattctttgaccttggcactgaacgaacgaatggaaggatggatgaaaccattaaagaagaagagaaaacgttgctttacgagcactgtactctatatatatgcgtgttgtgccgattaatctgttgcgccggtgcagcatgatcgatcacccaccggcacggcacagcatggcagccggcaaatctgatgattcctggatgtgcacgcaccaaaccagctaaaaaacaaacgcatacgtacgccacagatcgatgccgcggccgggtgtcggcagtgagcgagtgagtgaccagtagactagtgggtggcaatggcatgcatgtgacctgacctgagctgaatcaatcaaagtgagctcatactagtaccagctcataaactttgggtctgtttgcaaaacttctgacacgcagaactttttctcagaattataagcttcctccgacaatttaggtttttttcagattttaaaaaattgtaatggtgaaatttaaaaaatgaactgaaagtcagaaactaagaaatccagtgattcttataagctggctatcaaccagctgcttattagaatctaaaactcccccaacaaacactttgacaacggaggcggctggttatgtttattatggtgaaatctatttacatgagtgcaagctctatatttgatttgagtgtttgtgtgtatggttaactacttttatagtgatatggtaagcacccatcgataataacacatctattatgatttcgttcatcgataataaaatgcctatgataactttacaatttagacattatctcaggccttgtttttagttcctaattttttccaaaaacatcagatcgaatctttggacatatgcatagaacattaaatatagataaaatgaaaaactaattgcacagtttgcacgaaaatcgcgagacgaatctgttgagcctagttagtctataattagccataagtgctaagtaacttacatgtgctaatgacaaattaattaggcttaataaattcatctcgtggttttcaggtaagttataaaattagtttttttatttgtgttaaaaacctctttcaatatccagtcaaatgttcgatatgaaactaaaatattttttttcaggaactaaataaggaactaaataaggcctaaagttttgagaggtgccatgaggagggaggaggaaccccacacccacacatgtcaatccatgcaacagtggcgagattgtttgggcctggtttggtttgttgctcggtggctccactgcccaagctgagatgctgcctgtgcctcctgcctcttgcctgcctgacccatccattccatgcgcttttctttgaccctcgccatcaatccatgatgcctgcgcccacccactccatcaccctgcacatgtccaccatccatccatgcacctcactcactcatcgtcaacatgttcttccatcattttgtgcactaatcacctgcactttcagtactaccagtggttagtattttacatataatgcattggcaataatatgcaagaacaacaacttcttcagagatggagtagacaagaagcagcagatgctgcagtgcagtgtcctagatatgtcatgctggattgagccaagaggcgaataatctgggagagacgggtcaaagtgttgtagcatccatatgtagactgttcaaccagccacatgcagaggaggctggttggcttgagctgaatctggctcactttcttttactactgcttttgcctttggagtttggaacctgctgcaaaaactactacactcactggtctcgactggctctattcgaaaaagattggtctacggctctctcatgacttttgcttgatgatcagattttgctgtgcttaaactaagcagattctctgtgcttccgaagaccaaagtggtagcgactagcaacgaacgcagaagtgtaatgtaatgtaatgaaatgagaaaatgagcatgtgaaagtcttgttttgtttttgtccctaccacggcgatggagatcgcaatcgcaacggcaaattggcgaaatgtcccttaaaaggcgcaaggttttcttctgacggtggattggatgatccgtctctttcacagcgccaatcgagctgcccatttccagcacttgaccctaatttaagcaggcccagtgcggcaatagcaacagcaagaaatccatggatagattaattttaactcatcttaatcgtcacgtcatgtattctacgaaatcgttacaaaacagtcactgacatgtgagcctcgttagctgatacgactcgtccgaacccatatgtcagtgactgttcgcaacgatctctcttcgttgtcgattttaatttgcacccggtgtccctttcatcgttcagatataggatgttcttcttgttttttcatgtgcctatgtgcactagattagtgcaagagaacaaaagaggagtccagatggtggcatcctattcaacgattggccaccatgctaagcaagcaatagaggggttgggttggggtcgctattgaatcccgtgaaaggaggcggctctcgcttttgtgcgcttcttcttcttcttattcctccgtcgctcttttctcttttggagtctacgggttgcggtcagcgacggaaaccctgcacgccaccatctccaatttggcatcacgtactctctacaatactagtagtaattttactgctattaaatttgtatggtgaaatttcggtatagatcaatcagaaaaaaatttgttgtggaaacatgtttacatgtggcatctcataatttgcatggttttgaatatcggactgtaactatttgagaaggattttagctacgtgcttttatgtataaattagccgttatagctcaatttaaccgttacagttatttaaaaaggttaaccgttaaatgtctgaacccgctatttaaaaccatgataatttgccatcttgatctacatcatttagtgacttggagctacctcacttgttagtaagagagggaattataccttgtgtattgctaaaagttccgtttacatcagataaacatatgattttatcggaaaaaactaaacatctggctgtgtgtaatttgtactttctgtgacgttgtttggtccatccgttttagaaggttttctctcatccttggagagagaggtacattatatccccactacttgagaggtagaaaatttaaattggttaaattaattagaataaaaatatacagtcaataatattaatgtaaagaggtgtatatatattaccttatagtactatataggagttatctctttaagtaacaagaatgtatatacctccccaaatatagtagagaaaaatatgaaagctacttttatattccagcgacattatcctttttattatttagtactccctctgtttcaaaatgtttgacatcgttgatttttttagtacatgtttgactattcgtcttattcaaaaaatttaagtaattatttattcttttcatatcatttgatttattgttaaatatactttcatgtacatatgtagttttacatatttcaccaacttttttgaataagacgaacggtcaaatatatgctaaaaagttaacggtgtcaaacattttgaatcggaggaagtagtaactataaaaaaaacggggatattaaatacggagtataatgtacaggggaatgcaatcgttgtctgtctcaactctcaactctcaaccaagtaaaattggaatggttgtacagtgctagtcctcaagatgctcttaattcttgcctcccacatgcgccactagctagtgattgacttggatgtttttacctgatgcgcacgctacgaatatgcttaggtttattgcattattaggagggttaacagtaagttcaaagctcagactgtcgcccatttatcaaagagaataacactgctttattgctgggagtcactctctagaaaagaaaacggattaaaaattacctttcaaattcaggctccttttttactgaaaaaaaaacttctttcaaatcaccttgtcttttatgtttatcctaagtcaaaatatgcatatctttgactattaatcatttgaaatccatgtagtttaacaacatataaattatatacttaacaaaatacgaaagtatttctaatgatgaataaaaatataaatgttcaaatattaaaactataccattttataaaaattgatgatccaaaattaaaatgtttgaactagcacaaacctagaacgacagctaatttgaaacagagaaagaatgatgagtctgtctcaaccagggttcactttctcgtcggtaaccgcgcggtaaccgcggttaccgggcttaccgtggggggtcggtaacaaaaaccggcggtagggtttgggcaaattttgctcaaattcaaaaatttgaaaaataatccaaaaaaatcaaaaaaaatcatggatgtaaagcttgttttgtatgttgttatggtgaaaaaatttcatcaaaaagatgcaggtaaattcaaatttgagcgcaaaacctattgtgaattataaaaaagaaaaaagattaaatggaatgggccaagtatgcactgttcacgaggcccaataaggcccacaatgggaggaaaatatctttggaagcctctgcttcgtttctctggcgaatcctactgtttttcccctctctcgcgtagctgcgctcaggaccgaaggggcgacggcgtgcgcccgcgccagatccgccgcctccgcgccggcgaggccggttcccgcgcggtaagcggcggtaaccacgcggtacgcgacggtaaccgcctgggtcgacgggcaagaggtaatccctccgttttgaaggttttcgcgcggttaggagcggtaaccgtgcggttttgtatggttaccgtcggcttcgtaatctatgagacgatatacgtatgtgcggtaatcgtgtgaaaaccgtggtaaccgtccaccctaccgtggttaccgtggcttgaaccgtggtatggtattttttactgtgatatgcatggacatatttggggatttaggtcaatagaacatatttttaccaatatgcatgtgaaatacattgggaatatgagtttatttcggcatttggttgcccgtgcttggctaaaaccatgcatgtgaagtatatttgattgctttggtctatgtacatataggttaaattaaatacgtcatagtatggaagaatttggatgcatgcttaccagtgtacatataattacgtcgtattattgcataatgggaggtatgtttataattagcagtgataatttctcatgcatttgatacagggtggagatgttagatagtagggaccctgtgtgggagcacggggagaatatcccacctggatggcgctgtaagtattgccatacaaagaggggcggtggtggggcaacaagactaaagcaacacttggctgcaagagggaatggggttacatattgcaattcagtgcctccgaatgtccgtgagttcttctgccgtgagttggacaggataaaagatgcaggtgaccagcgtaagagtgatagcggaagaagggttgaagcagcaagggtcaactattatgacctaacaggtgatgccgacgaggaggaacaaatggaagcagccattgcagcctcacgacaagacgaaaactttaggagggatgttgaggagcgtggtggcacttatgagcatggcggtgggagtggatccgctcagccggaggcacggaaaggtagaagtaacccaattaccaatatgctacgaagggctacgtctcatagggagtcacctgctgtgagagattacaacctagcatctgccaaggcccctgtgcagccacgcattgacacaggattcttcacaaagaaggggaagcaagctaggcaagccattggtgagtcatgggcaaggttcttctttaccgccggcattcctggtagaaacgccgataatccatactttgtgagcgccgttcgggagacacaaaagtggggtacgtatgcatctattaaggaacttctttttttctaactcattgcgcactacttatttcatacgtcaattgtaggtgaaagtgtaccttctccaactggtaacgagatagatggaaaatatcttgattctacagagaaggatgtgaagaagcaatttgataggttcaagaaggattgggatgagtacggtgttactataatgtgtgattcttggacaggtccgacgagtatgtcggtcatcaattttctgatatactgcaatggaataatgtttttccacaagtccattgatgcgaccgggcaaagccaggatgctaactttgtgctgaaggtatgtatggttcatgcaacaaattacttcatcacctgttatcgtcagtgttaggggcatggactaatttttattatgttatctaccaatgcaggagataaggaaggtggtacgcgaaataggctcggagcatgttgttcaaattatcactgacaatggctctaactacaagaaggcgtgcagactactacggcaagaatacaagacaattgtgtggcaaccttgtgtggcacacacagttaacttgatgcttaaggaggttgggaaaatgccagaccacgaaatggtgattgagagtgctaggaaaatttgcagatggctatacaatcataacaagttgcatgctatgatggtcttagctataggtggtgaactggttaagtggaatgctacaaggttcggaacaaactacatgtttctccagagtttccttaggaagcgagatcttttcatgcaatggatggcttcctctgtcttcatgcaaagcaaatttagtgggactttggaaggtagatatgcacatgcatgtctatctagtctgtcttggtgggagaacttagaggcagtagtgagttctgtccaacctatgtactcattccttcggtttgctgacgaggacaagaaccccaatttgggtgaggtacttttgagatatcagttgctcaaaatggagtacgacagtctttttgcgaatcaaagggacaagtttgaagcatacatggagatcgtgaacagaaggatgcacgacctaaccaatgagactctcatcaatgccggtaaatattggtcataacataattcacatggcatattatgtaactcttacttaacctgtgccatgttttgtagctgccgcattgaaccctaggacgcactacgcgtattctccaagtgctactgtcttccaagacctccgacaggcattcgagtggatgacggatatcgatacggctgccgccgctttgttgaaggttgagatgtaccgacgtaagacgggtgaatttgggagggcactagcaagaaggatggccatagatgggaaaacttcacctggtatgtttctaatcatggaactatgatatatctaattgatcttgatgtattcagaattatgaaatgacatgttacttggcttttgcagcacaatggtggtctatgttcgcctcagacacgccgaatttgaagaagcttgcgttgcgtttggttggtcaatgttgctcctccagtggatgtgaaaggaattggagcacattcgcattcgtacatacgaaggtccgtaatagacttacccacaagaagctcaacaagctagtgtacgtgaactacaaccttcgccttcgaattcagcaagcaaatgcccaaattagggtggaggacgatgatccccttcaaagattagcggacctctcattctatgaaactaacaatcatatcagtgcctggatggactagtgttgatagcgatgaagagacccaaggaagcccagagtaccaagagtccaatgatagtagctcaagaactgaaacagatgacggcgacgacgatggtcaaggaggccaaggcactactaatgtgccctcctaggggtcacacccaacaatcagatcaccacagccccgttcaattcactggtgtgatataattcagttgcaatttcaaccttcatcttccaattcagtactggataattttcttgcaattttttgatttgcaggtgagggcgacttcactcatgctactcaggaccaggatcatggtgctccaagctctcaacgaactaccattgcaccgggagtccgacaacagcaacaattcagtgacatacaacaggatagctctagctcattcagtgcctctaactttgaaagtggctatccaacgtatgtgtacaaccatccccaagcttctgattatcctgttactacatgggtgtatgaatggcaagagcctcagtggtatgctcaattgtacgctcagtggcaaacaacatcatcatggacaggtcaaagttgggaggaatacaaggcggggttgctacattcacatggcttgatgctcatgtccacagaggagtacaatatggcatataatcaatggaatgcgtagctatgcatgtccttgtttatttcctttcattcgaactagaattgtaatcgtggacattatactgtggactctattgttattgtggactatattgttattctggactgtattgttattctggacctacatgtggatatcgttatgctttgaaatgtgagattgatgattgttattgttgttataatgttatgaattattgtattgatttgaactccacaatatagagtaggtcatgccgaatttttctgttgtataaccacatcttaattaactaaaatactcacattttagtttttttctattatttttttcatttttcttatttcagttccaacatatcgcggttaccgtcctcttatcgcggttaccgtaccaaaccgtgcggttaccgtgtctataccgtggattttgaattcaaaaatttggaaacgaaatttgtgcggtttttcgcggtaaccgcacggttaccgcggtaaccaccataccgcggggggtcggtaaccccccaaaacggtaaggtgaaccctggtctcaaccagatatatttatcaaagaattcagactagtatttatcaaagaaaacaatccaggtttattatttggagtcactatctagaaatgaagactggtacataagtttaggctgcgtattttgactggattaaattgaattagcttgttgtctcaaaccgatgcatgtattcatcaaagaatccacactagtatttattaaagaaaacaatcatggtttattacttggagtcactctctagaaatgaagactagcacttcatccatcccaaaatataaacatttaaaatattattttaaatagtgtcaagtcaaatatttttaattttaactattaatagaaaaaaataaaaaaattaatcatttaaaattgatgttactagatttatcattacaaattatcataatatgcaattttttatttaaaacatcttatttttatagatattgttagtcaaagtagcccctcgaagactgtgtcgaagtctaaaaatgcttatattttagaacagggagagtacttgtgttttgtttgactgaattaaattgaattagctagttaattgtctcacccgatgaatttgctccatctgtcaatgagttaattatctctttctacatcttctctctcaccgatagtcatatcctatgttggttttttcttctcaaggtgtggtctccatcctcttatctgcacactgtgtgcaggttttagcagtgtagctatcgctgtgtgtcgattccatctcgagctacagttgaagccataactttttttgatgcttgcatttactaagacgaattattgatcgatatggcgattaataacctggttaaacttcgttccagctagctcaatcctgaccacgacagggtgcctctcgatcaggcaagttcagctagctgccgactgatgtcgttttgataggattacaagtcgatcgcttgactcgttcagatcgacctgacgaccacacagtaattcgactagtcatgtggtcgtgtagtatttagggcggttggttttggctgattagctatacgcaaatagatttatttgattttctcaaaatcatgttctatacagaaagttttcatacgaatgtaccctttagcactttaaaaagtatattaacggtaaacgagaagtaaccaagatcaattaactctctacactattcacttgatcgtcgaaacggattatttgctatatgattcaaaacatacatttcttaaagaaaaaactttatgcctacctattaagtttgttttaaaatatttaatttatccctataatcactcaataatccgtttcaaactgagcctaagctcagctgagatcgaaagcagcaaggagaatcaccgccaagaacgccattgccatcagaagagcacgagattttagccctttctgagatggaatatatatatacaccaccggctctcgtggtaggggctcacccagtagtcgtcttcctcgatcttggacgatcgtagcgatccgtagagtagcttgtacgcaaacatattcggtctggaatttgtcatttgtacaagacaagcatgtgattatgaactccttgtatgcatgtgtgttgtattgtattgtctttaagaagaaaaaaaaatacatgtgccattctgatccataatcacttgcagcagaatacaatgctggtccattctgaaatattcagatatctgacgaacaactcactctttgccagaagaagaggttattgatgaagattgcgatcttctctagcacattctgatttactactaaagattgcaatctttttttacatagcagaccgtgatagattgatagtagtccgatactcagtggcggatctagaaaaaaatagtagtgggggctgaataaactacatcagcataaatcgaaccttcagtccccacatcctatggatctatggaaaaaaaaatttagtgggggcttaggggggtctccactgtcccggggtggtagtggggtctcgagacccctccgcccccattgtgaatccgccctgctgatacttactaattaatcctattactacctgcttaaaaatgggtagtgaaaagggaattgcagaaatgcagtgatccactggattggcgccggcaccagcgaagactaaagcttgaatgattgcaggcaagaacacacatcataaaaatggccagcaggttgccaaattgttgcatccgattcccaatttccaatggacgcatacatcacatcttcttttttctgtgcacttctttccttctgttcttgccttgatccatcctgggagagaataattctcatatgccaacaaatatcatgagagaatcctatggatgtccactgttcgattgtgccagtgctttatgtggtatctgactggcgtatgcttttcaggtggggtgttggtgatgttgcatttgcagttggagaatatatgtagtgtttttttttcatcataaagtgcatttctaacatacaaaatactataaacatataatctcctttcaaatatattagttcgaagccattgttctattagatgatagatacataaacctatgcctaatgatgatgtgcagctcatctccttgctttttgaagagttctgaatcatgtttaattcctttttaccagaagaatatagaattagtaccccactttatcagctaagtatgcttctctttttaacaagtgcatcctggacttcattaaaaaaaccagtcattgagtgagttaattggggccagaaccaaagataagatgccattacccgtgtgatgatgcagcatgtgcttgtcaggagaagagcttagccatgactcaactttgtagcgaccactaaataaaaattaggtattggtctggttagagactaatcagtgtgatgtgtaaagcaatatagtttgtcggacagtagcaaaatccctgacgttttctatttcaccaaacaactgtagaacggaagccaaagcagataaaaagttctgtttgatatactcagaatatatgccattagacatgggaacaatttcaaatatgcaactttgaccattatttttgaacatgaacatgcttgtaagaaatagataagtagtaaatcctccccgtttttaaattgccgtcactggtgactatcattgttttagctttgaccactaatttactcttaaaagataaaagtagtacgacagatacatgatttatgattatatttaagatgctttaattacaattcggtgacaaggtataattttttagcatttcagactttcttaaaataattttaaattcaaagtttgaaaattaataaatagtgcctaatgtcagttatttaaaaaataaaattttttaaactagttttcaagctaatttatgagcttatataatttttctgactgatctaattagttttcgagctagaacattgttgtcacaactcgcaaggtttgtaaaatttcacttcaaacagtttagaaaagttttccgagaattttacatgaaacatatagtttaggagcttggaaatcgtgaaatgaaaaatccaagataagaaaagaagagggctatagtactatattattattattattattggacagagaatgggtgaatggctagtcaaattatggatgaactgtcgtcgccttacagtaattacatgagctattggagttggggagcaaccacatactctgaatggagtcggcggtcaggacacaattagcagagtcagacagacagctaagagagaatatgagagataatgatgcattgatgctttgtccttttgcggtctggttactcaaagtgtgattaggtcgtgcattaacctctaagtggtgacataattaatggatggattatcaaaatgcaaaaactccaatcttatttttgacgactgcataaaagtaaaaaaagagatagaaccagtcagacaaaagtataactgagagatagtggcctggaaaactttggggaaatgagatggcgaggcccatatcatgtaagctcaaggtctggcctgccattcaggaggtaaggcctaatatagcccattgcatccatgccaatgcgagccgaggtcgtccttttttttgtttggggggggggggggggggggggcattcaggaagctttattaactcacagaaatagggttacaatcacgagctaagagctcggtaacaccctcaggcgcctggaagcgcaaacctacagactctttcgaacgtaacgcatagtgtatgagaccatgatcgagccactttattttcaaccctatctctccgacttaaaaaaattttcaatcctaactatatgtgtctaggttcgtagttacgagttgattttttatggaaagtagtactaattagagcagatcgaggaccatgaataacatgcagccctgctctagctttctgaattacgaagtatatgccagacctgagatttatcacacccagccgatcttagggctgcttctacgttagcacaatcggctccaaggatgaaaggccccttaactcactcatttaccaggcggatcccaccacggcaagccacctgcttctgcttcttcagccgatgcacagcctctgatcagcttccaagatgaaagcagtaactttccctcctgattgcgaaccacaatgcccacactcccttccttggtttgttgcacaaaagcaccatctacatttacctttacccatcctgggccacacatgacatgtcggagagaagggagagagagaggggggcaggaagaagaaagagatagaggatgacatgtgggtctcataattttttttagtgataaataggacccacatatatgtttttaactctaatgtcaccaaagtgccacatccgcagaccaagtcaacactgctacgtgaacaccacatcattgaacttgtcctccgaaaccatcgagggagtcaaattacaccggtattaatagttggagggtctagatatccggtcctgcggttcaaggatacgaatcagattccgtcactagttaagggactaacagtgaacttattcctttcctttttctgttagggccgtagtctaccagcctggtccggcccacctccaccctgggccgtgcctgggcttaggccacggcaacatagccgtcctacgttgaacccatgcaaactgacaaatctattctattttactttatttttttatttttcataaaaaaaaagatagccaaagctgaccatgagctccgccgcgccgccgatgcggaatcgcggatgcggtccacccgcagatctccgaccatcagcccaacccacggtttccccgccctccacaccccaacctcgtccgctccgtcgccgacgacgactgcctcctaccccatgtatataacccccgccactcctctcgatgttgaggtaaatcgagtgagtccgcaagtcgttcgcgattcttgatcgagatctgtcagggtgataaaggtaacggtctttcggctgtgtcttaggattagatccaactgtttctgtgcttggaacagttgcagagaaactgtagtttcttggatcagtttgtcgagtttgttttggtggatttagcatctcgttcttttgtttttttgtacaggtttagaacggtgctgagtttgttaatcttgggagaaaagggaaactgctctcgagtatggagatggtgttgccagtcgcgaacgcgactgctgcagcacttgcgcgggtttctgctatgttcaatgccccgcttgctcgtgctgttgtctttgggattcatatcgatggtaaatgatatttattttctccagcagctaagaaattctggagttgtatcgtgtttcatttaaattatgcgctatgcgctgattctgtgattttcagggcacttggtcgtcgaagggcttctcattgccgcaatactcttccagctctccaggaagagctacaagcctccaaagaagccactcactgagagggtgagctacactttgctcaataatttggaattagtagttttttctgttcctttccatttcttaatgcttcatcaattgtgttaatcaggtgttttttttttggctcaacaggaggttgatgagctctgtgatgagtggcaaccagagcctctctgcccacccatcaaggagggagctcggattgaggctcctacattagaaaggttcgtctcaattctcaagccccatcccctcccaacaaagtagacatttctaattagtccttcatgtcaccagtaaagtgttttatgtgcttcaccaaaggctctatgttgcaatgtacttctttctttcttttttttttaaaaaaaaaagattgcatgggttcagtttgtagccatttcatttagtaaggattagggaagtcggtatataagcattgttgtacacttatactatgatactatgacctagtgagcatggaatatgggtgttgatctccagagcttgttagttctagaattacaaccaaactatgatttagagttcacacaattatagctatggttccccactatctttgtaccaagaccgagaggattgaatactgatattctattgtttgatcagtgctgctggaccgcatacaattgttgatggaaaagaagttgtaaactttgcgtcagcaaactaccttggtttgattggcaatgaaaagatactcgtaagaacctcatgcttttgctaatattctttagtactcttttagaacatttgagtgatgtaaggaaattgcaggattcctgtattggttcggtggagaaatatggcgttggatcatgcggacctcgtggcttttatggaacgattggttcgtaatgttctgttacaacttatattcaatactttgtatcttgtggccaaaagcctaatgcaaattcaggggaggaacttagccattttgttgttttcagatgttcaccttgactgtgagactaaaattgcaaagttcctgggaacgcaagattcaatcttgtactcctatgggatatcaaccatcttcagtgtgattcctgccttttgtaagaaaggagatataattgtagcgtaagtgaacctttttcctcctgtttacaacaatttagtaacatattattcaacattttctaatgaattgagtcgtgccataccatctgatgtaaaatgaacatagatattttattgtagttctggaaattcgtagaattggtaatatggtatcatggacctcgctaatccttctgtgttattgacaaacctacttgaccttctagccatcatgcatttttgaaactcataatttcgaaatggtgaattctttttttttatgcgtgctttcagtccttatatatctcttttcattgttcatatttaaaattattagctagtttttgcatccagaaaaaaaataattcagtatggccacgttcttcataaaaataaatcttgatattcatatgcaatgcagtgatgagggtgttcattgggcagtacaaaatggtttgcagctttcaagaagcactgttgtttatttcaagcacaatgacatggcttcacttgcgagcactctggaaaaactaactcatggaaacaaacgtacagaaaagattaggcgctatattgttgtggaagctatttaccaggtttgtagcttactcatgaattcttttttgctgagaaatacattgactgaatttgtttctaaagtctgtctactgttctggatacagaattctggccaaattgcacccttggatgagatagttcgattgaaggagaaataccggtttcgtgttattttggaggagagtcattcttttggcgttcttggcaagtctggacgtggccttgctgaacattatggagttcctgtgagtgctccctctcatttcttttcatatatttccacaacagcgaatctgaaacaacaaataaagaactgggcaggcataatcagtggctcagtagacaaagtgcaatttgtattaagaaaatcttccttgttgactagcttagtttgctgcacaattgagttctactagttttctaagtattctttaccgattgcagattgaaaaaatagacattatcactgctggaatgggaaatgcattagctactgatggtggtttctgtacaggaagtatcagagtggttgatcatcaggtaggtgccacatcagatcgatagcatattgatgatggtatagaaatacctgcatcttcagtatttttaactggctgtactgttgtcatcttgcagcgtctaagcagctccggttatgttttctctgcctcgttaccaccatatcttgctagtgcagcaatttctgctgtggaccacctggaggagaacccatcggttcttgccaatctaagatcaaacatcactcttctgcataaaggtcactaattctcttggcacctttatttcttgcttccattaatttaccgaacatagtgcactggtaatatgttactaacctagtttataaaactgtgatgtacttactatgggctatagtcaaagtaccgaaaatacacaatgtttagcatccttacaagtattttgatgtacttgtgatatcaaaattttaggaaacgtctggcatatttcgctgtatatttgtccatccactcatcttttcatttgcatttgatgcgcagagttgtcagatgtacaggggcttgaaattgctagtaatatattgtcacctattgtcttcctcaaattgaagacatcaacaggttctgctgttgctgacctggagctccttgaggttatttcagagaaggtatttagtggtggattcaacaaattcgtgaaaagcacttgagatttgatttttggagttaagccaataatgtattttacgtaattgtaatttcacaggtattgaaggaagattcagtcttcattgcagcgacgaaacgatcgagtttggacaagtgtcgtcttccggttggaatccgcctattcgtatcagctggtcacactgaatctgatatcctcaaagtatctgaatccctgaaaagggttgcagcatcagtgctctagtgacaaactgacaaccttgcatctggcatgatgtgttctacagttacgtacaaatctgtatgctcgttgatctggctcaatttgctgtcgtgtctagcagaattacaaataaaattttgtaaaacagtttgaattaaaatatctggtagttttgttcttctatagtctctgtacatcggctgattcttcaacagtctgtcagttctggcattgttagcacattggtcaacaactcaacatatgcaattcattaattaatagaacaaggaaaaaaaagttcagcccagtaattcccgtgccatacaaagcccgtgaaatctcactggagcgggccatgcggatttgggccgatgcgtgtatgggattttcacacggagcatttcaattcccacaggaaaggtgaaattttcctccatttcgaagttcacacggagactcagatttgtctttttagtcatggctatttgcactgaacataacttactcctatctatcatgcggaaaacaatgatcaaatttaagaaccaagcagctttaaaaagccagagcccacatattagtagtaagaatgaagctagccgatttttttaaaatattcttttttttcttctcaattttacagaaaccgaggggaaaagaatatttcgaaaaaaccgaggggggtaataaataaatcaaagttgaactgttcaagccaacaagggcaaggcaggggggagtggggggactgtacctggacaccatgacgctgagcaagtgaggcaggtagtcaggttgtccgtcgtgtgtggttagcagatgttaaagttgacatttcgacaataatgttgtgcacgaaatgacgactgtgacaaagcattcctccatccaagtcgccatccaagggcagcagctgcatgggcctgggcgccgcgcccgccccaactcggtgctttaatctccttcctcctttctaggagtactccttcgtaaaaaaaaatctaaataagaatatgatatcttttaagacaataaatttgaatatgagataatatgaaattatccacgtagattcatcatcatccacatataaattaaaggatgtacattagtccggattttcatcctttaacaaatttagcagaatccctaattaatactcctagttatgctccctttcagcagcaatcaatcccaaatactactttctttagttagttgcaagagcagttgcaactttgcaagtgtaggtgatcatgaaacaaaagcagtttttttccaaaggcgtcacggggaagcaaatcttccgctgctttttctgcttgctgctctgctgctgcacggtgccgccagtcgtgcaggacggaggagggggggagagcggttgctttgcgagcagggtgcagaacgtgattggagccagaggctgcggttgggcttcgctttgctttcacccggttttaccggcagaaatgggcatcgatcaccggtacgacacgcgacgggatcctctgacgtactgccctctaactttgagaggatgacatgtgggacccacagctagcggacccacatgtcggccacccatgttagagggcagtacgttagaggagcagcttccgtaggacaccgggtgcggctacttgcgccaacagacggcccagaatccccaccacgccaccactcacagatctgccagccggtcaggcactcaggctgcttctgttcttcagttttaattcaacgcccaagattatgatactagtagtatctgaatctaaccactaccactaccaacagaacagccgcctcaatttttccaaatccatgagcaccactgcgccagtcaccattgaccatcacagcacatacattggatcatgggaagcatcgaaaaaaatgacaagtgaatcacactccagatggaaatatgcataggtgaactgcagcaattcacagaaattttctcatgtttttggattcaattttcatctgaacaagcctgctacgcactaagagagactaccctcttcttcagttcagccaaaaggtgatcaactgatcactgtatgtacatcggacaaactcgggtagaaagatatagctagctcccaaattccagccaattcaccagagctcgtcatggtcctaactcctactggacacaaacactaataatacgctactaccactgaaccctgccactaatccaagccaaaattcacagctagcagacgagtccttcgcctgaagaaaagctatctacacatggatggagttcatcatcatcctcgatcgaacgaactagcccatcaccgcggctcccccacggctcacgatccaaggatgccctgcaacacgaacaccgaacgatccaatcgttagcaaaaacacctcacattttctggggaatcatgaactgaaattacaaagtggagcaaaatttaaacgaaggaagagggttagtgcgtactcaggacttggtcggcggagaaccttctggagacgtccttgcagagcatgcggcgcatcaggtccttggcctccggcgagacggaggcgaacgcgcgcggcgggaagcggaggttgccgcggagcacgcactggaagacctccgcggcggtggcgccgtagaagggcagggtcccggagagcatcatgtagagcaccaccccggcgctccacacgtccaccttctcgccgtactccctcccggccaccacctccggcgccacgtagtagggcgtcccgaccagccccgtcatcggcctcccgtccccgaaccaccccgccgacccgaagtcgccgagcttgagcacgccgccgccgtcgaacaggaggttgtcgggcttcacgtcgcggtgcgctaccccgcggcggtggcaggacgcgagcgcggaggccagttgcgccacgaggtccgcggcctcgtgctccgggaggcggccgcgggaggagacgagggagaggaggtccccgcccgcgcagaggtcgaccacgaggtgcaccgcggcgtcgtcctcgaaggcggcgtggagcgcgacgacgtgcgggctggccccgggccccggcgccgacgcgacgaggtgcaccttgggctcctgctccgcgagcgcgaggtcgagcgcgtccgccgcctccgcctcccgcagcggcgccttgggcgtggacttgaccgcgaacgcctcccccgtggcgacggcgtagcagcggcggacggtgccgaagcggccgcgcccgatctcgtcgccgatgacgtactcctgcctcagcgcgagctcgccgccgctgctcatgctatctccgcgattctcttctccccccttcttctgtctccgctggtctccgacgccgcggccgcctcgcctataaatgcagccgggaaacgcagcggccaaggagacgaaatggaatatccgcctcgccttttttttctttggctcctagcgaacccttttcttttcttagagaatggtatttttaaaccgatctctaaacttaaccgggatataagtaatcattttaaattgagaacttagccacttaacaattcaatatgaaattagctcttataaaaatttaaactcaggattttggaaggctactcagggcattataatcactaggctacatactctttcgcacctagcggacctacctggtgatgtgtatcgtctcgtattttttccttctctattttccatttaattacgcattagcatagggattaataagctttattagttattactaccgactcatgatttaacaaggaaataaatttgagcaaaataaaaatgagatacgcatctccccagatggatattatctactaaaaaaaatctccccaagatggatgaagtgtattatgttgtcttactcctaataatgtctttcttttaaagtttggagatttgtatttatttgttgaggggattataaaacgggagcagtggacgggttgggtttggttgtttgggcaggccaatggatgttttttgttctaattttttgggataaacaagtgcagaaaccgatgtaagcacgggacaagtgtctgtatggtcggtggggcccaaagaacagcgaattattggggcccatgaaacgtggcctccttggagcgtgatgacgaggatactgtgccactacagtgtccgcatgttatacacatctgcagcgttggacctggccatctttccattctgcccatgattatattgctttttgaaagggaaaaaggtaaagaggagaggaaatggactaccgtctcttctttgtttaagctcaattaatcccccttggttttacaaactgtgatcaaacacaaagttcactattttttatttttattttttgcgaaacagtgaacaaatggtagcactgtctcgttgttggctcgtttaattttcagataggatcgttttgatcgcatcgagctcgagcgatccgatggcctcgtcgacgaatatatatggaattaatgccgccattttgttgttttgtggtgcggtgttgtcgtgattacgattaaacagcttatccatatttggtttttatgacgaacgaggagaggatatgtagggattatatatctgcatcttcatgcattccttgtgcgatcgacacctgatctgcatgcgtaatgaaaacctgccacgattggtacccgtctcgttcgttcttatcaactggactagccaacaaggcccacgacgaatgcatgcgtgcctaagcaggatttacgcatgcatgcaggcatgttgtataaatctttttaccgtagagagattgtctcgattaattacctggtctagatatttacgcggaaaaaaaaggcatcgaaatgtgttcagtggtgaaatgggccattggtattttttttttcttttggcacgagggagaaattaatatacggtcgatcgatcgcctgaagtcctgaactgtagcgtactccctccgaaaaaaaaataaattatgggtttccgtgtccaacgtttgaccgtgtgtcttatttaaaaaaaattatgaaaaaaattaaaaagacaagtcacgcataaagtattaatcatgttttatcatttaacaacaatgaaaatactaattataaaaaaattcatataagacggacagtcaaacgttagatacgaaaacacaaggttcgtcttttttttttatttggaacggagggagtacgcagataccagctgcagaaactcgatcgagaacttacgtcgctgcttcggaatcgccgtagaattccacctacggacgcgctcgatctactgtcagtatcaactgcgcatgcgacgtttcatcgttgatcgttcacgacgcaatgtgtacagtggcttaaaccaacgacaagtggatcgcgaacgctgctgctagcgaacagcccccgacagtgaagccgcgagcaagtcccaccaccgatcgatcgtttcatcgttcgttgcgtttccgccgttgaattgaccgcgcgcgcgggcgctgccgccgctgccgctgcttgacaagaatccgcgcgcgtgctgcactgcagccgcgcgcccacttggacgacgcggtgaatccggctgcgacttcttcccaattcccaactcccaagccggcaaaccgcgcgtttcgaacggacggcgacgacgacgaagctaagctagctccacgttttccaaactggacgcgccggcttcgcaaccggcaactcgatcgtatcgcgcttacttttctcgcattcgcagcctagctaccaacctaaaccgtatattctgcttcaattcagacgtcaacgaacacacagttccggaatctcatcgctcgatccatcgatcggctgcgcttgaacgatagtgagttagtgacagaaagctactactatatgataacaaaagcggaaagtgtgtatatatagatgtacatgcatgatgaatcaaacgaatcatgatcaccaacttgataacaaacgattattatcaaatttatcatgttaacaacgaaaaggcaggcaacggaaatggaccagctttttcatcagcagttgaggccaggaagaaaagaaatggaatatgggttggactctgcatttagaattgctctgcaaacctggctgtgggggctgaccaggcaagtggattaattgaaaaatattaattatttctatagttgcatctccatctccaatctcctcctctcgatcaaaggaccaaatacaaatgctcgtggttggttggtcactgactttagcttagatccaatgaccgcagtcttaattagctggcttgatatatcatttgtgctgtttttttttatctgggtgatagacacctcgcacctaattggaattgtttttacaccactaactaagggaggttatatatatctcatctcaacgtttattttatactggccatataggttagctagcgccatatctaatctaaattcattggctttagtttatatcaatgaatgaatgattctgacaaaaacaaatggtcgtgttcagtgtttgcgcatgatgcaagctgactccgatgaaatgtttgtttctgtacgcatgttgccgaagctagcaggctaggatcaaatctatatgtttgtttctgtacaagttgccaactactgtacgcattctacctcttgtaaattaactactttgtgcacataaacaagtgctccatacctccatacatatacgataaaaacatatatcactgtcaatctgtcatctattctgaagaggtaagccacatattttggaagtctagaatcgacgccggctgacactgcatgctgtgtataatattcttggagcatacataatacaatacgtgtacgtggaaagataaacaaaaatacacgtaaatatcgatcacaagttcacaaccaagttgttatccatatttcgacaagtacattatcccatatgtaaaaaaataaataaattaacttgcatgtttaaaatgatttatcacatattaatttaccatgttgattttttaaaatatttttataactatttgaatgacacgtaaacaacgaatgaatatacattccaggtagctgtacatcataaccggctattaaacaccaatcagttctggtcgtgctactcgtggttaatcagtcattcatttttcttgaatcgtaccaccgctcataataatgatatctttctaccacatcaacaattaaccggttattaccaatcagttcttggcgtacgtacgcgtggttaatgggttgactacgacattttgaaggtatggaaatgtggtgaaacattaattttttttacgctaactcttacacggacgacgagtcatcacgcgagatgagatgtggacgtgagaggaattgaaccgggcgcggccaggtgcaatcgcacgcatgcatgcacctgtgccgagtcgattggatgaacggcgcggtcgccatgtcatgggtgacgtacgccaccttcgatggacttcgaatgcaagaaatttacggcatgaatggaatgaaccaagaatgcacgcgcgcgtgcatgcttcttgattatgtcatcgacgacacaccacatactctatccggatctttggttattaattcctgcagctatctatctagcaatatatattttctgctatgtgtaccatataaattaagatcatctctctctcttaaaaaaacagtagtacgtgttcctgggctccttgcaaaaacagaagaagtacttcttccgtttcacaatgtaagtcattctagcatttccgacattcatattaatgttaatgaatctatacatatatatccatctagattcattaacatccatatgaatatgggtaatgctagaatgacttacattgtgaaacggaggaagtatattgttaataccggtcagggtcagcgacatatattgcctggtgaaatagtcgtgcaggtccttgggagaaatgaatcctacgagactaaaagtggataaattgatgtgtgttctgttttcataaatttgtcaattcatctgtaattttatactcccttcattctgaaatgtaaggcataaccacccttaacctaaagactaagaaaataattattatcatcttatagtttggatcatcctaacaaatacaatgcatgcatccaatagaattagagaacatgagagtggaggatttaaaaaagtactccctcctttcctaaatgtttgacgttgttgatttttttaacatgtttgaccgttcgtcttattcaaaaacttttgtgaatattattcaaaaacttgagtagtagtagtatatttaaccatgaatcaaatgatagaaaaagaattaataattacttaaattttttaaataagacaaacggtcaaatatatttaaaaaaatcaacggcgttaaatatttagggacggagggagtaataatttaatagagaaggggccatagttaattgtctatatgcatgtatgccttatagtattatggaacatctgaaaaagtggctgtgcaatggatggagtaagtatgttagttatcctaagacctaagcctatcatctactacgtgcatgcacgagaccactggtctggtctcgtatgattattttccgttcttgacagagcggcggcttcacgcaaccaattggagacggcaaaggccgtttgttgggcctcatcgattcgtccaaaatgggccaacacagataatcgtccgaaatgggctggccttcaagctcactggtgggctgggggagatgcacgtgatgggctggctcctcggctcgctcgctcccaccgaaccagtaaaacgccaaaaaaaaaaaaacagaaacggaaaaggctaatacgccattaaccacccggcgcccgcgccgcttaattccaaaaccctcctgataaaccaaacctggcgcggtacgcaccacaccatcgctacctcatcacgctcacgcgtctccctttctccgcactcctcttcgctctctctcgtgatctcgtctgatcagctccgcctccgcctcagaattcagaaatccccaaaccccaatgctgctgctgcctcgcagtcgcacggcgaatcggggataagcaccggaggagggatcggagatggaggcgccggggctcgtcgtcggatcggcgctgcgagccgcgcaaccgccaccgccacctcctctcccgcgctccccgcgtggcgctgcggatcgcctcctcatcttctcgcgggagcctcgacctcgactcgcccctctcacccggtgctactgttccaggtacttgcttgcttgcgaagttgcggttccactgcgctggcgctcacgcacccgcgcgcactcgtaacatgtggatgtgggtattcgtcaccgtggctttgtttgggcgtttgatcctcaaatcggtgtgtattccagggaggggaagggcaatgctcgcagcaaaccccatcgcgagggctccaattccgttcggtgtgtgctccgccgctcgtattatctctagattctttttttcagttttattttcactatttgacgcagcgagtggttaatttttgtgagtttgtctaggctgaacgtgaaagcaaacaatgaccaggtatgcattaaaacttcgaatctgtaacacgtttccccacatattttacctcatgtacctgcattctcttatggtttaagaggatcatgaatttagagctgatgtcgcaggaaacatatttggctgatgaacgacacgaaggggttgacatctgggagctattcagccaggctcagagaagtaataactacttttttttttttttaaatctgagcttaccattgaaccacaccagagcagtatcatttgatatttggcgtggcatgcttatggcacttttcaattagagtgaaccatttgcatcactttgttgtttgctaaaagaaaagcgttatctgttctgatggcttcaatttcacagatatcctacaccttaacaagcagcggcttgtggccatggaagagctcaagaaactgcaggatgaaaataaatcgcttctgcaggacatagaagtactggaaacagaaaggcaaggtgtggcggtgataccatcctaatgccaagatacttttgtgaattaactgtgaagatagaatgcgagatgtgtaacatcgagcaattcaatcctgtgtttgatgtgatacttctattttctctttatcattgttagcttaagagaataagaggtaaacgacagacctaaaatttgacgctgcattctccttttacatatttcaggtttttccatagaaatagcagaatcatcaaggttctctgagttgcttctgcgtatagatacaatgaccatttctggtatggttggcatgacagaagcgtctgatttaagaaagaaagttattgacaaccgatacatgatacatagcgtcttttctgatattcatcataaacaagatactgaactactttcagaattgagactctttctgcgtaaaccagcagagtatgtaccactacctcattacatctctcctccaggttccagctttactattgccatattatattcaaagatcctactgcattatacatacatctttcaatctgaataagcatgaaaaattgaaaatgcactacaattttttcgtatatatgccttctgcttatattttgtgctgtataattctaaaactgcatgttttctatatgatgcacaaactacctgtttaatctgagtttctgccatcataactgctacttacaaattttgcatagctacgttaatttaaattactgttttgcaggaaacctctacacgttgtgcacatctgcagtgaaatggatccaataacatcacgtggatcattagcaacctatgttactggattatcttccgcacttcaaagaaagggtaacttggtggaggtcatactgcccaagtatgcaatttctttgtgacaagcaagtgatcaccagtgaactaataattttgtccattttcaaatgtttgcaataattccaattatatttataaatggactaggcataaaaaagtgaacaatttcttgtgggttttcagcaacgtagagctataatacatactacaatgatcattattctaaaaggagagatgttttgtttttgataaatttgttggatttgggattgagctttgtatgtagtctgattttggttgtgtcatatttatgcctcaagtattgcaagcaaagctattgtgttaattgcactggtataacccaaaaacaggtatgctggcataaatgaagatgtaattcatttcctgaggaaagctgaagcagactatgaatcttattatggtggttgttggcataaaaacagaatatggacagggtaaatatatactcagtataacagaaatttcttactctgttgattatatcaagatcttaatttttaaaagtaattttatagagaatttcttgctgtgcgtgcttgctttagtcatgtttgctggtttctcctcctaatttaccttctttagtgcagtatatcaagtggtgttagtcttacactcatagaaccggtgcagctgtcatatttaccttctttagtgcagtatatcaagtggtgttagtcttacactcatagaaccggtgcagctgtcatattttgatcgcgatatgttacgtggctaccccgatgactttgagcggtatgtttttatgccatatggtatctgcttttgttttgattctattttgaataccgttgatcattagctctagcattttcagaagctcaacttctgatatatttgtgccatgctgtttatctgttgtatgtgacacacaaatgatatgtgcttactgcatgttttaacacatgatcctccattccccctttaagttgattgtatctattagacccttgctttgataccttgtttggtacataacaattcatgtgttgtattgagctagaaacagctgtatgtaatcgacaaaagggttatttaggcctgaaacaaactgatcggttatatagaccataactagcatatttgactacatttaacatctatgaatacattgttacagattttcctatttttcacgtgcatcattggattatattgtaaaatccggaaagcagccagatgttttgcatgtacataactgggaaactgctatagtggggcctctattctgggatatatttgctcaccaggtcagtcatgctatctcccaaagacattgttgtttcagtgtaaatgtttatacttcatacctcacaaattatttcttctgtcagatctcatgtttcttataatatatttttcactggtctcctagtattgccaagggttgattagtacatctcaaagcaaaacagggaacatatgcacactgttctacagacaggaaatcgatgtgaacattattattttctgcgtacagaaaaatacaccttcattccccctgtttatattgaacattgttgcacaaaagattcttcccagtctttagaacgactataaagtattagaaatgcagttgaattttttatatgctgcagaaaatcatctgagcattttgttattcctcatgtgaagtttttccttataagttgtattcaattttcagggacttgggaacactcggatattactgacatgtcaagacttgacttcgcaagtaaatatcatatatgcattatttgagttgctactggttaaccgtatttgatgttcttaattaaacaggctgatcacagttgctaaacataatctgttctaatatcaaatatctgaagaacaaaaaaatgaatccttatgatgcagtaaatcatatcttcaaattatctgtcgatcttttttgttggtgaaattgtttcattagaccttgaaattgagaaatagaagtacacatcaaatgttcactgttggttaccagttaccatatgggaaaggaacctatgccttctctgctatttcctttccttttctggcaatatctattagggacctatctgttattattagcagtattagctaattcatattttcagtgagtaccctattggaatatgtatgcaccattaccatcataagttcattcactctttcaggcatcgtgttgctcaaatttttaccaacaacacagcgaaatttggattgactagagattttcgtctttcaaatatctttaaactttaatggacatattaacaaaaataatcctatatgcagtgcctagaggttccaaatatgctggaattgtgcggacttgatcctcataaacttcatcgacctgatcgtctgcaggataatagcgaaacaaatcttgttaatgttctaaaggtcagccttcttaaaattttaggagttgatgccatgggttgagtactgtgacatatgacaattgaagactatgctattgtttttttctaaatttctttcatctttatatttaatccttcgttcatgacacttccatctttctataagaaactagttcaaagatgtgcttgaagaagatatcaaaatgctaaacagaagtaaattgtttcacacataatcctttgaatgataaatatgtgaagcttaattttgaataaggcaagcaccatggcaactgcaatcacttggcacttgcatatttgcaagctttatttcatgcaaccacatattcagactgtggttcgtgtgttgtgtggaattatcatgaggagaactttgcttggctgacatgaacgactttgtttggcattatcagaactgtgaacaatatcagtattattaatctcaattgacgtgttttaagtcctcgactcttgatatccccaagaaaactttgtatgatcttcaggtcatcctgttttcagggatgtattgtttattcaaatagatatgaaagtgcttgactccttgatatccccgagaaaactttgtatgagcttcaggtcattttgttttcagggaggtattgtatactcaaataaagttttgttaatgtcctcaaccctcccaagagatatggctatccaaggcttaggacatgggttggaagcaacattaactacacacaagtaattatcatcttgttttgctttttatattttcctccctgtagcctgtagggctaatgaatgtccatgactgcagtttcttgtttcacacacaaattttgttttctctccagggagaaggtgttggttgcttctcatggattggatggtgaactttgggatccatccaaagacatttatcttcctcagaggtattctccaaatgacattgaaggaaaatcattttgcagaaagacacttaagcgatgtgttggactccacagtggttcttccgttgttgtatgtacttctcattgtcttgcacaaaaaacatatttttgtttagtcattacagtgtttcatgaagtttatatcgtttgtcaggttgggtgtatctgcaatggtgattcgaatactgatggtcttagggaagctgttcgtgttgctctgcatggaggtgctcaggtttgtattactaattattaattgaggaccttcactttggactcaggctctctactagcgcagtttttagagtttatactgtgtaggtcatcttcatggaaaacaaagggcctgtgatgaactcaactgtgcaggcattaaaggaagaactgaaggtatcagtattactgttccatgtctatcatcagtaacctgtgtaaagccttctgtgttcacggagactgtagaatgtagagtaacattacatctcggttcacttgtttcaatttatcaaacagggagacagagtaatgtttgttgagatatacgatgaggccctggaacatttgatatttgcaggctctgatatatttctgtgctcttccttttatgacccatcgctacaaatagcggtacgtaaaaactttttctatttcccgcttctacttagttagctaatgttcacttcgcaatggcatccaaaaacttagaagaagtcagtatcacatgatttaatggaaggaggtattctccagttttcagagtatgatttattggtagatactcaccgagtcaagagtgaatcagctccttgacacataaccggcgcaacttcatttccacagactgtgaaatgaagcaattgacaagctctttgaccaaaactccttgcagttcagatataattttgttctttggtggcatttttattttgcatgtccgctttagctgtgtacttgtgtatgcgttgttgatcttagcaacatcataagttgccggaattatattttgatttttgacacatgaaaatgaaattaattctgcaatgaaagttagcttacaagttgcaagctcactactttgtctcgtagcaagttgactcttatctttgtgggcagattagagcaataaaatatggatctgcaccagtacagataaactttcccagtaatggatccaggtgaaaactgcaaaatattttatagatgtttgatgtgccaattggcaattatgtgttgtcaagtttactaagaagtggcaaatatgtgtttatgtgtacttatggcactgtgtttaaatttacttgtaaccaggcaaactgagtggcatgactaccctagcacagccctctctcagtacatcatctcaacatatggggacatgtccctttctcaagctctcgatggcattgtaagttcacaatctctaggacactacttagttaacacttatcctttggaagctgttgaatcattaggacatgccaaatctgcaagaaagaaggcttataggaagctaaaatagcctccccgaataagctatatcaaattttttgcttcttgaatgtgcagaagaacaacccttcccagtgggattggcgtattaaggatgcgatgtcaaaagttttatcatgggatgctgagtgctacgacctacattgggaggcttattccgttattaggaagctgtgaatgatgcatttctctggggactgcatggtacatcatcagctatctaaatacaaggcacagtttttgcccataaacaatcctgtaagtccagttgtttagcgacatgtaatctagctaagtaaacattccattctagtagtatgtaaagtacatgttaattttaaattttgattttgtctcttgctataaagaccttaatcgaatgttattttgctatagagacaattatgacaacaccacaagaagaattatgacaaaaataaaaccagtgcgattgtgcgatccaccagtttattggggttatttcacaacgttattgtgactgaaagttctattctgataggttgatttcttgcaactgaatggacaacggagagacagcaatattccctgagtgtgttttggagaaagcatagtgatgattagtaccaacgcacattcaaggtaacaatatgtctattttatttctaccccaaaacacaggtcatacccgaatggcacaaatactaggatctgcaagctggattttcaggatcatagtcatggtggtgtctgaacttctgatccacatttctctgttccatgtcaagcaagctctgcttctcctccggattggcatcacctttatcccaggggtgtagctggtatctcctcagcatctccagcttctcagcgacctccttcatcatcggtcgttcctcaccactcatgctcacacatcgcatcacgaggtgtgtaatctcttggagcacctcctctgtcatctcattcctcacctggctgtcaataagttcctcatggcggccatctctcacagccgtcatgaagcaagacacgaggctcctgtcttcctctgatccgccgaagtagagtgccttcttcctggttagaagctccaggaggacaacaccaaaactgtacacatcactcttgttagtcagctgacatgtcatgaggtactcagggtctaggtacccacatgtcccttgcaccagagttgcaatctcgaactcatcattaggcaccagttttgatgtcccaaaatctgaaacttttgcggtgagtttgtcatcaaggaggatatttgccgtcttgacatctccgtggaggatgggtggtgaggctgaagaatgcatgtaggagagtgcctctgctgactctgccgctatccgaagacgagagtccaaggatatgacagtgttgagagtgctgccatggatgtagtggtcgagggtgccgtttgagacaaactcataaactagcatgggaacttcgacttcaagacaacaaccgagcaacttgacgacgttcttgtggttgatctgggagaggatgcacatctccttcgcaaattccttggtctgtgcctcctctatcatctttgacttcttgatggccaccaccatgttgtcctccaggacgcctttgtagacgatgccgtagccaccgcggccaagaacacggtcggcggcaaagctgttggtggccttctcgagctcttccttggagaaaatcttgaacccacccgctccgccgctggtgccaccataggaactcatctgttgctggagaagcacgccaccgttctgctcaaagaatctttgcttcgttctgatgagcttcctcttttggagccccaggtagagccagaacaacatgaacagtaacaggaacacaccgacgctgacccctgaacatggtatgccaatgatattcattagttcccgacaagaaaataagtgcattaataatgttgcttgataaccggccgattgaatacctgtaacgactttcagagctaacgtgaacttgtccgttgggaggcatccattctcctgggttgcatttccactagtccccggtcggcattcgcaggtgtagcttccgattgtgtttgtgcattttccgaagcatgggtattcctttgtgcgttggcattcatcgatgtctagcgttggcaaagcaaaacatattcatcacttaatttttttttgtcagaaagattattactccatttgcgttttaggcacccacctttgcatccaccgtcgaggtaggggttgccctcgtagcccttggagcacctgcaccggtacccctggccgtcgctggcgttgaagcactcgctgtgcgcgctccggcacgcgtagtccgtcctgttgcgcacggcgatgtcgcagttgccggcgttccggatggcccagtcgagcacgacggggacggtgaagtcgctggttcggttgatgaaggcgcgatagctgtaggtggtgttgatccacttgtcctccgccacgaacacatactggcattttgttgagtcgagatggcggaagacgggttccgtcggcgggagctcctgttggtcggggacgtttcgcgttggttcctctgtcttattcaacgtgagtatgtaaggcttgtagacgttgagagcgcggggcatggtgttctggcagcaccccgactcgccggtgcactggcccggcaagtcaccctgcgactgcgaccgccggcacgtggatgtgcagccagtgacgtagttatcgtcggcgtcaaccaagtagccaaggacggggcacccgagcacgacaaggcggttcctcgctgtggagaaccggtaggcgatgctgcggccgtagtccggcgtgcggtagtgcccactgattgctttgaagcggtcgtcgtggcagttgcttcccgcgtcgacgaagacccggacctcgccgtcggcgatggaaaggctcaccagctttttctcacgatcatccaggtagttgaagtgcggagtgttgccgtcgcactcgagctggaagtctttgtcccgggcgcagccggcgccaatgccgaaggggtaggagatgctgatgttcccgcacttgtcggggcagcccggccatggctgagccgatgccggtgtcaccggcgccaagcagacgagcatgacggctaataagtaggcaaccgcctgatgcagtgtactagtggtagccatttctaacatgtataatcgccttcgtgttgttcttcttgccgtcttgcttttacatgccggccgggcttgatatccatataaatagatcgcgcacaagcttccttccttcgttttttggagggcaaatatgccaagatcaggaggatgtgtcatggaagctgcgtcgtgtattaggagttgactgaaagaacacgcggcgacgtgttcttttcttagagggcgcgctgtgtttagttcccaaagcaaaaaaaacttacgctgttaaaacaaaaatttttatgctgtcacatcaaatgtttgaatacatgtatagaatattaaatgtagaaaaaaaataattacacagattgcgtttaaattgcgagacgaatcttttaagcctaattgcgtcatgatttaacaatgtggtgctacagtaaacatttgctaataatggattaattaggcttaataaattcgtctcgcagttttctgacgaaatatataatttgttttgttattgaactacgtttaatactttaaatgtgtgtccgtatattcaatgtgagaaccaaacctaacaattttcctcagctaaactaggccttggttgactagaaagtacacgttgctttgccgcgtggaatactagactagaagaaaaagtgaatgtgcacgtagtattagttgaaagtaactaaatgagaaatgacagcatataattaaatattcattcaagaataggcagggatccatcagaccactttaagaatacttcgtcaacttaccctctaataaaaaaggaacagtcaaatcactaattcaattcatagcatcatatgatcactatcttttttgttttctaaacaaatacatggaactggacagctgatccaaatacaatagttgtgcaaaaaatattttgttgaaattttggaattgaggcaccaaagcttgttttgagagaagccatgtcaactctttttgttctctttttttttctcagaaccaactgcatataagctttaccaagcccatggacatgtctaattcataatttacgaagccgctgaaaaaaagaattcaatatgttcgtggttcgggtggacaggaagctcgtggctcgttagctcgcttggctcgtgacaggctcggcttgtttgaatttcctaacgagccgagctggcatttcagctcgttagaccgaagtagtcgtgccggtctgaccgcctggataccaccggtctgaccgagatttaatcttcggtcgaaccgctgagatcagctcctgacgcctgtagccatcgccggtctaaccgccgccttgccgccggtttgaccgccagtgagttgccggttaaaacacaaatcgaataactctcgaagtagatgacaactttattgcttctatctgtgtttacaaagtgcaacaacagcactccttaaaaaaaatctcgactaaactcaaaaccctaactaaactcacaactcaatactctcaaaagcgataccgggaggccacgccctccctctctatttatatatgaagtaggcagcccacgccctccctctctatttatatatgaagtaggcagcctaaagacacgaaccaaactcatactagaagtcctaatccacctaggaaaccttcccgtacaagaaacaaactttacaaactccaatcataacaaatttggactccttccaaattcgacttcgcatcccatactcacacaatacctcgtatgccatatagaatcttcaccaaccacgtgcattgaactctagcgtaagtatcccacatgatatctgaccgtcacagacatcgtcttaaccccaagccaactcccgatccatcaccgcaaatactatcttgaggcatcaagtcacctacacatgaatcaaacaaagaaatcatattccgagaccaagctatctccaacttgactcattagtagcaaacaacagtattacatacgcatagtatccatctagaagccataaacatgaaacaatcacggatatccaaacgaacaacccgaaaccgaaaccgacacagagtcgcccggtcagaccgcgggctgaccggtctgaccgctcgcatagcgccagtctgaccggcatcacctgcccggtctaaccggacctgacaaaacagcagtacctgtatatcacctgtaaatccaatcatctcaaaaactcctatccaatcatctccaaatatcaaaaccaataatctcaaataccaattatttatcacagaataagaatcaaaacacactttgatcttacagtatagtcagcggaatacgaaccgaaagagacaccaacaaaaccattctatcgaatggagaactgccaactgataatagaaagcacaagacgctattattgattttctatttggttagtgcctataaaacccataacaaatagctgatcagttcaagcaatttcatccaagaacaaacatctatatactataaaaagtacaagttcatccctaatcctacaatccttcagatccactatcacgtgggacccacctgtcatccctaagaaagaaatcatgcaccatcgtcgcgcacgaagaaaaaaaaagaaacgctgaagggacacacgatcccacgatcagataagaaaaaaggaggaaaaaccgctcgtgaccgagaatggcgtcactatgccgcccggcgccagcgatccatgcattcaccgccgtgtgcgccctcccaccgcccgctctccacgcctgccgtccgtcgccgctacaccacaacaccgtgcgccgccactgcgaaccattaattccgctcgcagccatcgcacttccacgccgcgcgccaccaaccgtccctggatgctgcacacaggtggtgccggcccaaccccagcgccgccgcttcccaaggtgtttcacgcctccggcgccgtccttctcggccggagtcgcgcctgaacctgcatattctcggggaaagctctaccgactgcctcacgatcccctccacccacgtctccttccacgaccatcgctggcccacgaatgcgttggcaaaggtggcgcagcccctgcccaagacggatttcagccgtgccgcccacgtcctgggcgggatccaccttcactcgtggggctcgcctgttccaccaccacccgtgacggttcaaccctcgctgtcggcctgccgctgaccgggaagggagcaatccgcgtcgccggcggtgagtttctctaagactattgaggtagctaacttgctcatggcctttgcagcacccatgtaggcttttttttttttctgatatgctctttgtgattctgatatgttaacgtaaattattcctgacaacagttgcttgaacgcttcaaagacttcaggcaccaacctgaagctcttattctttgaggccaacaagttcagggaacaatgaagaatcgttaaaatactataagcaggaaggtcccttgaaggatttcagcgagaggggaaccatgaatcagctttggttgcttagatcagaatgctccttccgaagtaatttttgttacagcatttccccaacgtattatgcacagctatctaatttgaagctataaattcaatgttgtattatttttgttatatacaagtatattgaaatgaggtatgccttcaccttgtttttttgggtggaattgaggcaaatggaaaagggcaaaagattggccatcaataagtcaaatatcattaatctgattctttttataaggaaagttgttgcttcagttgaaagtttatggttggccgttatggccttcacactagactgcttgttgaatcttttctataggtttttcatagtctgatacggtgtactgcacatgctatgagaaaacccaataagtatagctatctatatgttttttttttgacgaattcagcgaatggtaataactcagtcttaactagataaaactatgttctctcttgcatgacaactatagggctaactgaagaacctggatttttcagggaataatagtatatgttgcataccggcaatcccaaaatgttgcaatgaagaaactcatatgttacatactgcagaccccaaattcatgaatacaactttgggcaactttgagaatttaatcaagaataggtactgttaatgctatcctgtgtttgtcaacgacaattatagttctgaatattttttcacctccgagtatacatataggttatataacccactgctactctattttttagatttgtttgtgacttgtttttcccactgcccacatagatcctgatttcactgttaaaaatccatgttttccagccctacacctgcatgatctgggtagagtggaaaaaacgaaaaaaaaatccaagctgatcgaatttgatttttctattttcatctgtacctgtgaataatggatcatagcattagggttggatgctacagggagacagatctcggatgtgtcatgtattccatgatgcaaggtcgatgttggctattgtctcggcgtttcgaatagagaaggttaatagaagagaatgtaatggtgtagcttttttgggcatgatgtataacatgaacctttaactcaactgatttaagggtaggatgcattttttaacggaattgctaaccttctttcgacagattttgcatccccaaattaatcttgcagattttgggacactggatgggcttcgatattcgtgctccacgccttctcctccaactctagcgacctcctcttcttctttggtgccggcgaggaccctacgggttagggtcctggggtggggtgggggtgggaggggggaggggaggagttcgccggctctaaagggatggctgtggaaggcggcagcccaacggtgggcggcggatcgggcaggtggcgaggcaccggcggcggcaccggagctgcagggctggaggagggtggtgggccggtgtcggtggcaagggcacctcgtcgccgacggctcgaggaggaagaaggggaagaggctggtcgggggggggggggggtctcgccggcgccgttgatgccctcccgccagccgacgaggcgggcggcggcgcggtggtggcgggggatcgggcggagccgctcgccagcgcgatgggaggggaacgggaggaggagaggttgagattttgtcaacagatgtatagatagccccttttttttaatttacttcattcaatgtatgtcgacgtgccttgcacgtgcacgctaactagtgcatggaaaaagtaggccgtttcctgttatcaaatacttcctccattctaaattgatctacatatagttttttttagattattcctaaatgatctacatatttgtgttcattcattaagtctattcgttatttatgcattggagtaaatggacattgatgcatgcatccatgtacataagtatttataacccacatgcaatatcttaaatggacattggctaggaaatagtggggatggtgcatgcatcgagtttgttgctagagtaaatatagtatgagagagttattagctttttttggtcttggtgtacctatgaaatatgtagatcaatttggaatggagggagtatagcacacgtacaggggatcgctaattagcgcatatgcgcgaattgctttcctggcgcacacgtacatgtgacgagcatagatggacggtgtcgtcagaaacggaaaacgggaaaaaaacgtgattagcaccagtaatttaagagggcagctagcccacgggataccgtggaaaagtgaagtcacgggacaatttttacgtgtgattaattagcgtacaacatgttgtaccacaggtaccaggtatcacaagtatcaggtaccaggtgtcacaggtatcaggtaccaggtataacatataccaagtgccaggtatcacaggtaccaggtgccaggtatcaggtatcatgtgtcataggtattaggtaccaaatgtcacaggtatcaggtaccaggtatcacatgtaccaagtgccagatatcacaggtaccaggtgccaggtatcaggtatcatgtgtcacatgtatcaggtaccagctgtcacaagtaccaggtaccatgcaactggtaccatactggtatcagctggtatcagcatagcggcggaaaagcgaacaccagtcaaaaagagaaaaaaaataaaatctatgttacataatatcattgtgtcaattaatttacatgacatactaaatctcaatgtgtctcactcaagaaaagaaacaaagcaagaaaaggagaaaacgaaaaattaaaaatgaccgtggtatatagaagatgtaagtcaagcctacagaggtgcatgcccaaattgattcacatggcccaagtgcccaaccaatatatctagagtccttgtgctgcaggaagaacacatacacgtggatgtgttgtggagtatagacctgccacttagtaggaaattgtgtcgcatgcgtgtacaattgttttgatggaaataacgtagaccttttaagtcatcccgtaggaacgggatgccgttctagattttctggtaatttaatagcgcgtgcgtctggtcccctcccgcgtcctattttttttcttttacgattttttttctttcacaatttttctttccttttgcgcttttttctgattatttttttaatcttcaacacacgtattttcgaatgttttgagttgaaaagtttttaaatcttaacttgaaaatttttaaatcttaacttaaaaaattttcaaatccaagttgaaagttttcaaatcttgagttgaaagttttcaaatctcaaacctaatcgccgtcggcgcccgacgcccggcgatgtcgcagctgccgacgttccggatggcccagtcgagcacgacgggcacggcgaagtcgctggttcggttgaagaaggcgcgatagctgtagttggtgttgatccacctgtcctccgccacgaacacgtactggcattcagtggagtcgagatggcggaagacgggttccgtcggcgggagctcctgttggtcggggacgtttcgcgttggttcctctgtcttattcaacgtgagtatgtaaggcttgtagacgttgagagcgcggggcatggtgttctggcagcaccccgactcgccggtgcactggcccggcaagtcaccctgcgactgcgaccgccggcacgtggatgtgcagccagtgacgtacgtatagttatcgtcggcgtcaatcaagtagccaaggacggggcacccgagcacgacaaggcggttcctcttcgtggagaaccggtaggcaatgctgctaccgtagtccggcgtgcggtatagtgccccctgattgctttgaagctgtcgtcgtggcaattgcttcccgcgtctacgaggacccggacctccgtggacacttgtcgggctgagccgatgccggcaggggcgtagctaggggtagtcccggtgggcccgggactaccccaaaatctggcccagagaccccccaccccccaaaaaatttaggcccaaataggttgcttggcccaaatagcccataaacatctagggttggagggattcctaggctcccagccactcaggctcagccgcccaccagccagcgccgatagccgaccgcgcccggcgcctcctcctcaactccgcgccgccggcgccaccaccggcgtccccaccccgcaagcccgcgtctctgcgccggtgcggcgccgccacctccgtccgcaccgacaaccgtcccctcccctcctccgcgccggcgccgcgcggcctcccctccagcctcccctcctccgtgccggcgccgcgcggcctcccctccgacctccccgccgtccgcggctcctcgccgagtcgccgacgacgacgccgcgccgtgctgccgacctgccgactgccgtccgcccgtcccttccccttccgtggctcagcccactagccaggtaacaaatagatgcctaaactaaatggctagatttgtgaatttgtgattagaagatttgtgaatttgtgattagagattagttagtctgtgaataactgagaatgcaatttataaattgttactaattagtgaatgtgtgctaaatggtaattgctattgtttgtaggatctatgttgattgttggactctctatgttgtaatatttgcacatttcgaacttgcttgctaagtaagccgcttatggatgttggaagacattatttctatcgcattttcactaaatttgtatttgtatatcagttttatggtgcaagaaaattttatcatgtgacatgaacttgtgaactaggactacccaaggaaaaattcctgcctacgccactggatgccggtgtcaccggcgccaagcagacgagcatgacggctaataaggcaaccgcctgatgcagtgtactagtggtaggagaaactcttttaaacactcgggtggacgtccactcgtttcttgcatgtcatctaaatagttatgaaaaattttcaaaaaaattgacatgataggttaatatgtaatactccctccgtcccatattataagggattttgagtttttgcttgcaacctttgaccactcgtcttattcaaattttttgaaaataattatttattttatttgtgacttactttattatctacagtactttaagcacaactattcgttttttatatttgcaaaaaaaaatttgaataagacgaatgatcaaacgttgcaagcaaaaactcaaaaatcccttatattgtgggacggagggagtatatcacttcacaaacatgcaagttcaaattcgacttctacaaattgtaacaaaaataataaatttgactgtgaatatacgtatactagttagagtttgatttgttatttttgttacaacttgtagaagtcgaatttgaacttacatgtttgtgaagtgatatattacatattaacctatcttgtgtttttttttaaaattttttcataattatttaggtgacatacaaaaaacgggtggacgttcacccgagagattagaatccatcctcgtagtggtagccatttctgacatgtaatcgccttcgttgttctgcttgctgtcttgcttttacatgccgggcttgatatccatataaatataaatagatcgcgcacaagcttccttcgttaattagttggagggctaatatgtcaagatcaggaagatgtgtcatggaagctgcgtcgtgtattaggagttgactgaaagtacacgcggcgacgtgttcttttcttacagggcgcgctgtgtcttgtagtattattagttgactagaaagtacacgctgctttgccgcgtgaggcctgccagtggtttcaaatccaccccgcacctacaccaacccaaaaacaactacactagcccacccaatccaaaccaacccacaaaatacacgcgatccaatccaatccgcaagttgttctccacaggcaacccatggattctacccacagcctgtttggttggggggagtttttagaagggattgggagtttagagggatgaggctattaactgttttatttggttgggagacatgggaattttggtgggatggggatggggatggggaattgaggaatgaactccctccttttcaatactgggtagggggtggtaattgggagggaattcttcctttactttgcctaaacaaatctcagccatccgttttcattaatgacctaatctccaactaaacttcctatcaatttccaccacctctaccaaacaagagactggaatgaaaaatcaaattcccatcttaatctcaccatcaattccctcgtgtaaactcctaatccccttccctcaagttcccaaacaagccgccatggcacacagccggctaaccaaaacacacagccacacatagataccatagtcactctggccgcatacataggtagttcgtaccatagtcaaagcagtatgcgtaccatagtttactttctaatttataaattgtcatcaaatttgaaagtagcaacgaaaattaacttagcacaactaaaattagctaggcaatttgtacaacactttaccaatattatacgaactatcatggtgtctcgtgcagatagcgtggctagcatcattatattttctctcatataatagcatatatgttttatcaatgtattattcaaatatattaaaatgacaacataattttaaattttgtactaactttataaaactactaatgtgtaatattcatattgttttttatacatgtgttagttattaattatttttaatattaaattttagttatttgtaaattatattcctatatgtactttagactcgtctttcaatatttttttaattccgaattttcattatatgtaaattgtatttctatatagattctaggctcttcttctaatattagttaattttaattctgaatctttattatttctaattatatttctatgtggactctaaactcatctttcaatattatttaatttttaatttcgaatttcagttacttctaaattgtattcgtatattgactttagactcttctttccatgttttttttaatttcgaattttacttatttataaattgtatttttatacgaactctaaatctacttttaattttattatgtttatttcaaattttagttagttttaaattcctatatggactctatactctacttctaatattccttatttttaattccgattttatgttattttttaattgtatttctatatggactctatactctacttctaatattccttatttttaattccgaatttctattatttcttaattgtatttctatatggactctaatcttctcttccaatattccttattttttaattccgaattttaactatttctaaattgtatttctatatggactctgtttttctttttctccgattaatatgagaatttctaggccgtgagagcgaacgtagaggcttctttttctattcctttaataagttaatagatagatagttgaacatgcataagcatgctacttctgcagctcaaatcagttagcatgcaagctatgatcctctgatgtaattgcttgatgtggttatccccacaaccaaaaaggtggttctactctcttgatgctcatccatctcaggtgctttgatttgtaatagcatcaacacaaactacttcagtatgtaaatggtgggttcaaaactcaaacaaacaagcattgtagattttctggttcagtttactaaactggaagcaagaatcaggtttcagtaaagattcaataatactgataccataaaatttaagtgtaaaatatcaacttagagctaaaatccatcatacaaaaaactactaccttttcggaccatcatactttagaataagttagtgtacaaaaataaatgatatggccacatagacaagcatcagctaccaactgcattacaattttcaagttactttgagaataatcatgcaaactatagagaccaagttttcttacaagctaagaaggaaacaatgttactttgttagtctagctagtagtagatatgcaaaaattatacatttaattaccttgtttcttcggtttaaataaccaatctttagcacaagccagtgcctcaagcatatcaggtgtcaatgaacttcttgtgtctccaagtatccttcctccacaactaaaagctgattccgaaggcacaatgctgaatggaattgctagaaaatcctgagccataattgccagtataggaaaccttttagcatttctcttccaccaagccaaaacatcgaaatccttgctatcatcctcacaaacttcttctaaatatgtctcaatctcagacttatgtaatcgtgttcggtttgacttaaaaatagcaaactcttggtcaagctttcttttgcctagaactggcgagcctacagcagttgcttctccttgctctgaatgtgatagggaggacacaccccttctccttgcaattccttcatatactctgaagtatgacttcatccgctctataacaaaatccactttagtttcagcttcattcatattgggagacaccttggcataaaagaattccaaataatctcgtttccttcttggatctaagacagtgctaatgacaagtgccaaattaaaattgtttggcaatttttcatcccaatacttagcaaacttcgtatgcatagcactagctaattgagtcaaaacactagttgtttgccaatcaaaatcacttaaagcatggcgaatgcaaagaaccaagtggaaaactagatgagccagctcaattgaacctatgttaacctggaacatcatataatcgatggatatatatgaatggcttcaaatgtttgctactgacaagtaattttagatacattaaaaatgtctcaagatctctaaatagttaaacctaatacacttggatatatatgtaatgtttattacacagacataaaccgtttaagagcttgaataatcgaagcatttgataaatctccatttcatttctctggtaaaatagaatggctaacggacgagtctatgcactgaatgctactacttttctccacatatatatgccaaaaattattggtctgcattatttgtatagcgaaagatttttacctattggttgaatcaaatgttgatctgtatcttgttcttcatcttgttggttgaatcaaacgttgatcagtatcttgttcttcatcagtttcctgtaattataatgatagagttaatatatttgttgttagcacgttgtaagctatatatttttaaaaagtaactgtcattagttaaagaagttccgaatttataggattaagatagcgcttaaaatatatataaagaagcagacgggttacgactcatgaaatatatattcccatcataaaatttcaagtttagttatcaattttgatttatgtatacagtgaaagtgttatgtttagaaattatagagggcttctaggtttgtcagcctctaacatgttgataaaaaatgatcaatgatagcatcaattatcttcgccgtgaataaaagcattaacagatatgtgcacacctaaagttgacagatagtggtaagagctagttgaggagcaaccactccttttaccaccaaccaaatattgacataatatgcactgtgacacacgaaggcctgagagatctgcttaactcatagcgtatccatggagatgatgctcctatatatttcatagccgaggaagtgcttgaagagcctgttgagactgtgatcgaagatacacaagaaccagaacttgaaggtattgattttaattatatttttatgtgattacaatataaatatggtatttgttgcgtttagttctccttatgaagcgaacatttttcgtcccatctttttaatcctacgtccgccattgaggccaagatcaagatactgaaggatgctaacaaaaggagttggtagaaagattcttgcttatcaatatggcctaaaggagttggtagaaagattcttgctttatcaatatggcctacaatggaggctttaactaggagtaaatttcaaaagactgcaaatattatgccaaaacttatcaattaattcgttgcaactatagcctaaattccacaaagctgcaacagtagctaatgattttttattagaactgcaaaatttgttccactagtaggccaggaacacctgttagggcacccgcaatggttatctataggctctctacaagagatccatgtcagcatattttcctacttggaagagattaaatgaagagagagaggaaatctatctactaacctggagatagtttatagagaaaaacgaggcaatggattagagagctatagatacccatgtagacataccattgaagtggtttactattaatctagtctattgctgagatgtacatgttttatagatagcaccttactttaccattgtgggtgctcttaggcacatctaaagtcttcaaaccagcccgagaatgcagcgccctcagcgttttgcgctggcgtggcccctgccgcgtcgcgacgcgtggacaggcgctggagaatggctggatttcgcgagctctcgtgcggccgcgtcgtccttgcaacttttgcaggaaagcccttcggtttctatgtaattctatcgaggtccctcaacaacagtgctcctgatatgatatttttacatttagttccgtaggaaatccaggtatttcacgcgaagaacaaaaaaacaagaacagggaccgcgctctaaaatgtagaagccgaggggttttgtcgaaaaaaccccgcgcaacccacccccaaaccctagccgccgcttccagtgtccccttctcccttcgtccctccctctccctctcccgccgcccccgccaccgagagccgccgtgcaccgccgcctccgcctacccctcgcgccgccaccgccgccgccgccgagcgccatcgccgtcccccatcgcgctgccacctccgcctcccgccgtccccattgccgaccgcctcggcctctgcctccgccaaccctagccgccgctgccagtcccctcctcccttcggtgaggcgagcagccatctccgccttggccaccgccgtcgctgagcgccgccgcttccgcctccgcctcacgccgccgctaccaacagccgccttcggctgccggcgtccggatctgggctccatgtggccgcaggcgtacagatccgccctccgttgccgctgccatcgaagaaacgacggtggtgacgaagccggcatcaatgaaggcggtggctgcggcgagaagaggagaaccgtacatcgctaggctgatctgccgacgagctcggcggcaacatggtcggtcaactggcgctacggtcgatctggatggctcactcacaaggcaagcctgtcatcacactgtcctagagccgggtcgccccagtgagggtctggtgctgcgtccctcctcatcctctccctcacgcagctgcaagattggaatcactccggtgagtttttggctctttctcggtttctcaatcctctgccttccttgattttttccccttttctttgttctttactttgctgatgtgcataggttaacgagaaacgcgtccagccaaccacttctcctcggtgactatttttctcttccctccagccctggcagcaatagagcaagctcatgtcaccgtagtcgcatgctcttgggggaggagatactagcagcccgcctaaggaaatcttcaattcttcatcgccgtcgcttcctcaaggtttgcattatttttcacgggcgtatttgttgccacaggaaaaaaacatgttagctgatattgtttctctatgttacaacaggtgagagtgtttaggaagaaaaaaaatgaattatcatttcttatcagtcataggatagtacagggaaaacatgtactttggggaatctattatggacaatagtaaagggagagttacttttaaaagaataaaccataaaccatttccaatttaccattattattacgcaatatagaacgacagtagcttgagctcactcaatctgatttttttcaccttttatcttatttggcagttcaagaactggtgtaatagttgatagagctatacttgcagaagatagaaaacatggtggcttcaagaggttggtaattaccataggaagtaatttgatacaaagtttaccttaagtagctgagtacattattaatttgtttatttgtctgtaacaatgatatcttggattatctgcaaagagaaaaccattttttgacatccttgttcattaaagtggatgctaatctacatgtaaatataggtgtttgaactgcgaactgcgaactgctaccctttgataggctgatcaatatcatatgccttcttcaagtcaatttttcctctactttaattggacatgtttagacattttattttgcattaattttttctctattttattttgccccaacccacagctccaaggagtgaatctccatggctaaagaagcccatgcatggagtttcaggctcaactgccatggctagcaccccatggagctcgatgccaccaagcagccattccctgggtaagagcccctattcctacctcctccattttctctactgctactactccttttctattaaaatctaaactaaggtgcttctcggaaaagtacccctaggtaatggtttggtttatgcttgatatactgaaggatgctattgtggtagcatgtaagaaatcacttgatcccttctcctgatttgtgcttcccagatccccacgagctcacaagttagtgaactttatttccaactgttggttcagctctccatgaattggcagctgtgcttgctagctcttcctgtccccttcctagcagaacagatggcggtgctgtacgtcaccttcttgaggttgattgactaaaaaccttgaaaatactccctccgtttcacaatataagtcattctagcatttcccatattcatattgatgttaatgaatctatacatatatatatatctagattcattaacatcaatatgaatatgaaaaatgctagaatgacttacattatgaaacggaggaagtagttggcaagggaggtggatgtggggaggggttgagttgctctatgtgctcactggttgaagctgattgttgcgctcctatctacctcacttatttaccaggaggtgttaagctcattcggtgagaattttacctactcctttcactgcattttccttgaccacacttagattaaaattatagcttccttcctggtagtagcaaattgtggcaccaatgtggcacatatttattggttatctaaattattttcttatattgtgtcttgactctatttggtgttgtaaggcaggttagtggctgattaattagctgcattatgctaccccgttattactagcttaaataagttgatctgttcttgatgcaatttatacatctatgagctggtcacttcatcagctttactcaggtaggggtctttcctacatgagtggctattctctccaaactaataaaaattcatgtgagttttgttggtattttagcacaaaaaaaagtactcaaatagctgtttgcctggatgctatacccaccaatgaattttcaattatgggatggttcttattttttttgtacatgtaaacagaacctgaacatcagatttgatgagagattcaaccaagaagctaaaattttttgcgactgatgtgcattgctgaaccagttttctgttgcataaagagtcctgaaacttcttgttgcaaactgaagtggtgttctaaccagttttcttcttgctttctcattagcttctcttgaatctttctgtaggtttctttcctgtagggaaaggaaaggtgatttcagttgcctgactgttgctggaatctgtgaagcatctacaagcgatgccatcggttcaggcagctggcacagcaatgccggttccccttgccccatatccaactcctgtgccatttacacctcccaatggtatggattccaacttggcactgcaagaacacagctacattttgagttttttttccctgatgttggttggtcacctagaaatgttggtacatgccatagtgttcgccctgatgcattcttttggactagaaatcttatgaactgaatttcaatagacagctttttcttgaatcagatgttactgttcctggttcagaggttgcagtttattctgctcatagaaatcctgaaagtttagagagaactccttgttgagaaaatggaagtttttttactgctgagtttcgttgtctgaaatgaaaatgatgcatggaagatgcttttgttgtctgaaaatgaaaatgttagctgctgaaatgcgacattcagtcagtctctgaatttcaggggcccaaagccagctcgtttgctctgggtgccgtaatctgctcatgtatccagccggagcaacgtcgatttgctgcgcagtctgcagtaccgtgaccgtggtgcctgcccccggtatgcacatcattcactcaggtttacatctcaagttttttttttttgcaagtaatgtggcatctcaaaattgagtttctttgcatctaaattttagagtagtttagaaatttatattgtatcctctctgttttatttacaaaaatgagtattttttgttttttagagcagaaatctagctgcaatgttcacgaaaataaagagagattaaaggggaatacaaatggcttcagggctccgcaacagtgcgcgtgtcgcgttgatggtgtgcctgcactcaggtccctaatccgctgaccttagctatgtgattcatttttgtgttgctgtcatcagtgtttcacttgttctgtaggtcgctcgagaagaagtacacactgaagttgctctggtcatatttacattattgtgtgtaactcttccttgtttgcttttcagtctaggatagagatttacatgtcaaagagtcaagtgcacttttgaaagtgtaatgcgatgcaagtaaaaacaattttggacaagatcaaaaggatccatgtcatttgctgtcagaatagtaatgtttgttacttaatgaggtttgttacaaaccttaattacaggaatatcattgtagtagttcttaactttttacactcctatttgtagatgtacatatatttatgtacaattatcagatggactattttatacactactttctccctctctatatactacctccgttttttaatagatgacaccgttgacttttttttacatgtttgaccattcgtcttattcaaaaaatttacgtaattataatttattttgttatgagttgttttatcactcatagtactttaagtgtgatttatatcttatacatttgcataaattttttgaataagacgaatagtcaaacatacgagaatgatgagttgatgacatttaaaaaatgaagggagtagcatttacatttatttatgtataattatcagatggatgatgagttgatgacaataccttctatttatgctgccctttctctacctgtaatgtacctctgaatttatcttagtcatacctatattaagcgctacatactacgtgccttccataacaattcttgccttaagctttcatcggttcccgacgccattttatttcttgcaaccaaaaacataatcatgccacttatatcagataaacaacattttttttctttttgctaatgctatcagcaagtaatcactaacaccctattctacctccaccggtgcagcgcacgaagctcgcgtcccacgctagtatcggttaaattaaaacctgccctggattggcgagcggagagcgattaggggcggcgtgttcgcacgcggagctatccacgtcgctcgcgagtgctgggaggcgggcggattccacaccccctcgagcgtccgcgcgagcggctccggcgccgtccgatccctcacagcaacggccgagatcggtcgtagttcctagcacggtggacattttgcaaaaaaatccataattaatatataatttgttttagatctcgcatggtgcgatcatatgttctgttttcttacatatagatcctccataaccaggaaaatcctatacggagaagaggaaaaaagaaaataggactgcgctctgaaaaacacaaatcaaggggcttttctgaaacaacataaaactctgtctccccatcctccctgaaaccctagcccccgtgtcgctgcgcagcctcaccctcctcgcgccgcctctccccgccccaccgatgccctgcagcgccgctccatcctccgacgcctgtcctggccccgacaccgccgtgcgtcgccgcatgtcctccactgcctttctctctctctctccttgctgccggtgccgctgagctcgagctcgagctcaatggtgagaggctcagtacgtcgacaacgagtcggtcgatccaacattcaatcgggttaggtcttcgtccttctcactacctcgtcgtcgatttacctgtctactcaatacaagctccacgctgccttccgatctggtggtagctgccgtgcagcgatcggatctggcgaagggaggaggagcgcacggcggcgtcgacctgaagtaggttgctggcggcgtccccagcgtggtggtgtaggccgatgggcccaggaggcggacgcctcgagcttgcgagaagatggcgtcggcacggagttctcgaaggcgaggagtcggtctggcggcgcatgacttgattttcgagtgatgtgggggctccatgagcagtggcaagctcctgtttttttctggtcatcagagggaggaggagttgtctccatcgtctagccgttctctggatgcatcaagcttgccctcatcgcatcacgccatcgtccacttgtatttgattttcatttctattccccaccaagatttgaggtgtttgttttgtgtgatgccctgcctacaaggtgttcgttgtttttcctacaagcatggtgatgtggcgatcttaaagctatcagttacgcctgcatgacctgtaatgtaagcccgaatgatttgttaggatctagatttggatcctactttccacttaatttctctaaacatttgaaactaccttaatattagcagttagatcgatattcataatacaagggaagagttaaaattgctaatgaaatgcatcattgaaaatattcatttgtagttagttctatagatgtatgcatttcatatataatgattgctgacaactgcttttttggctagaatatttatgtgactatctacctcaatagctaaagaacttctcgaattgcaatcagtcgtcgcttgtccctgtgattcataaatcagtatggtccatgagattcctgattgagttttcaaggaaaacaccagcattaggtggccaatactgtgcaaataattctataatgtgtgacgcccaatctggttttagaaaattgccctttgtgtgttctgtagatgaagagttcgagaatctacaaccagataaatttaattcctataaccacagcaggcatggtctgccataatgaagaggttttttactgcattcctttagctcatggtcaaaaggacagtcagttgtaatagagcagaagcaatgttcctctgaaaataacagggtacttttattttctagatgctactatgccattattagttttagctatgatcttccagctctagcttaatgataagtaaataaagccatacagccccatattaaatcattgataattaactaatactccacatccaaattgaaagaataatcactaattcaatattcttgtaggtaacctctcatttattgcacgtttggatgcaacatttaggtggcaaggagattatacattggcgatagcatggagcaacaggcagaaatgccattctttgttcattttattttccttttttttttagtttgattagattatggtgcttaaggagctggatttgctgttaaatcttaaatgatttaaacagcgggctatgggttcactattggctagaggtgttcagatcgtttaattcttacatggcatttcttttgggtcctgcatctataatcctggttgtctttctgaattgagataatacaaagcatgagcctatatggctctttctgatcacggaattcgtctttatgcatctattagctttctgatcacgaaatttttcttacaacattgaaaatgcctgtttatctatgcttagaagctttgctggttatttctgtgtatagctgcaatataatgttctctgtatttgcgatactactgtgtaaattgctgattacagaagttgtcttgcaagaattgaaaagaacatgtttctgtgcttagatgttattctggtaattttgtttgcataacttcaacacaatgttcactctatttatcatagaaatctatgtttttttctcccagtgacgatttaaagtatctccacaaaaaaagatttatagtagaatgccatctaatatgtgtttgtgatcttgagagatctgttgattttttatgtatgatatgatgaaaagttttagtgtcaaccaaggtatcaaagattattgtgatctaaatgcagttgtctaccttcatccaatgtttctataaaataaattatggtgtgcactagctatgtagtgctagaagtgaaccatttactctgtaatggcattggttaagaaaaacgttggtaaccaatgctccctgtatttaaacatgctgtcatttaaacagctactccctccgttttatattgtaagtctttttagcactgttcatatttatatagatattaatgaatgtagacacatatatatatgtctagattcattaacttatatatgaatgttgtgtctacattcattaatatctatatgaatgtggataatgctagaaagtctcacattgtgaaacggaggtagtactattttgtcatgccctcactatgagagtaatgattatgtcttatggttaattctgatgctttgttgttcagtgagagtgtggatctttaattttattcgcccacaacatgcttaatggtacccctttgttggacttctgatagggcacgcaacgcgcgcaaaatgtctagtatgtgtaatacttacactgttgcaagttgagcacacatgtcaaacacgtagctaggggataaaagttgcagtttaccgataaaataatttcctatcgctgcagttttgtgaaaattttagctaaagtagtagcaaagtgagttttgactagatagttgcaattttgagaaatttactctttaattaatcatcgaggtacctgccacatctctgcaattaaaactctaaaagctaccccttccatctcattttaaacatagacataagtttctgtgttcaactttaatcatccgttttatttaatttttttttaaaaaaacataagtcacataaagtattattcatgatttatcatctaataacaataaaaatactaattataaaaaattcaaataatacggacaatcaaagttgaacacggaaactcatggttgcgcttaaaatgggacggagggagtacatcaagaaatatttcagaatattcatagtaagttttattttgaataggccgtgacatagtgcataagagatgttcccataatcccatgtaatcctagataacttgaaattctagttaagtctattaatctaattggtaaatctagtattatatagagatgatttgcaaatcccctatgttcttatttaaatgttattaatgatcattcgttgtctttataacatgttgttttcacctacccttttaacagaagaatgggcaagaaccatttaatactcacagttacatatcattggtctatatggtctatgcagctttaggcttttcttttgttttattacagcccacatacatttcttggttctttgggtgagcaccatatatgtgtttccatgtcacaagaacaagaattttaaagaattcgtcctcttgaatagttcaaacaagtaggttaatctttacttatctgagaaaaaaataatccagcatatgactagttgtatgtgtgacctatatattagggaaaaaataaagtacttatgagaatcatagccaccctcctgaaggtaatgtgattgcataaattatcaacataatacaaaggttaatttcatgcgcctggaagaaagatgacaaaaatacacattcagatgaacatcaacaaaacacggttgtgcatatagctttggaccgcgtgcctttcataccttgtacattgtgacaacgctttatattttaaaaaaatttccactacctgggataccttgaagagagcaagtactcttcttcaaggctatactgttttgtcgactccatacttgtgccttcatttgccgggtaactcattgagacatgattctccttagaacttttattggccatgctatgtatagcttcttgctgcagaaacaatgatcttatgctttcaagtgtcatttccacctgtctcatagtgggccgctcctctgctttcagcttgacacatgccacagctaacaaagctacttctttaacttcttttcctccctcttccacgacttgaggatcaagtatgtgacccaagttgtcacgtgtgagtagcgtagtgaaatgcgaaacaagaccgtcatcctcaggtgatctgtatgagtatggttttttcctagtaagtaactctattagaacaacaccaaagctaaaaacgtcgctcttctcggtgagacgtcccgtgtaagagtacatggggtctaagtatcctagtgttccttgaataacagttgtgactcctgtctgttcagcaggaatacaccttgaagctccaaagtctgatacttttgctgttagggagccatctaataagatgttatgggacttgatgtccctgtgaattatggggaatgatacagccgagtgaaggtagccgagggctctagctgtttcagttgcaattctgagtctatcttcccatgacaatgataatggcccttcaacatgaagatggtggtaaagggtaccattcgatatgaattcataaatcaacaatgacacttctgtctctaggcaacatccaaaaagtttcaccacattgcgatggttaatctgtgagagaatggctacctcgtttatgaactcatcaatctctctttggattgctacctttgatttcttgatcgcaacaacatgaagatccgatagaatccctttataaacggtgccgtgccctcctcctccaatctcacgagattcatcaaatttgtttgtggctttttccagttctgctaaggggatgatcatcctttcagcaatgtcggtattttgagataccaattgttgcaacaaatgcccacggttctgcttaaagaacatctgtctaagcatgtttgctctacgattcttgatcttacgtgttaaaaagactgcaccgaatgccatggccaaaagccccgcaccactgccaactccaataccaatagttaaacctggagcacaatagaagggaaaaaaagttttcttcattagagaggcgtactgaatttgtttgtaattgagaaccgttagtgccagtacttgccgaacagttggttaataagaaatcagccttatggaaatattagcctgtaaaaacatcgtagtctgcttttgtttgtttatggaacagagtaatttgtgctggtacttggccgaacaatcgactgttctctccaacaaaacaaccccgtcgtttggcttatttacaaacgaaaaagaatttatgaataaaacttttatatacatattcttaactcttaacgatctagaagcaaagactgaaaaataaactacgataaaaaaatcctaaaatcaactcaaaatttaaagttgaaaattcaaattttgcaactttaaattttgactcataagtataagcataagtgaaaatataagggcgaaaattccgttgcacattatagctagcacactctcaagtctcaggtagattagtttagcatcttcaattaatttagatgtctggataaattccaaaatgataagaagattaatttagttacctagatcagttttgacgcagcctttttcaatgagcgggttaccacgagcacctggcgggcacatgcacaagtaccctcctagcgtgttggtgcacttgttgccgaagcatgcgtccttatctcgctcgcactcgtcgatgtcttcgcgaatcgcccaaatcgacgggaattagcttttgaactcactgttaaaatggagtttatttcacgggaggcgtttttaattttgtaccttggcatccaccgtcgaggtaggggttcccctcgtagcccctggagcagttgcagcggtagccttctccctcggtggagtcgacgcagtcgctgttggcgctccggcacgcgtagtccgccttgttgcgcatggcggcttcgcagctgccgacttcccggatggcccaatccagcacgacgggcacggcgaagtcgccggtccggttgaagtcaccgcggtagctggtactgagccactcggcgtccgccaagaacacgtagcggtaatcagtggcggcataatactgaagggtgacgttcttgggcttgtcctggttcacgtagtaggtgtggagaccggagggtatcgagctctggcagcatcccacgccggcgcacgcccctgctgacacggcgagcggcgacgaccggcacagggatatgcaaccggtcacgtaattttctgtggcgtctaatagaaggccgaggttggggcagccgagtgcgacgaaacggttcttggccgacgagaagcggtaagggccttcccgtcccaagaacaagtacacgacgtcgtttgtgcggacgaggtcccccgtgctgtggttgtacaagctccgcgacgcgttgttgtatatccgggcctcaccatcggcgagggacaggctttcgagatggatctccaaattggattgggaatcgatgacggcgatgaggcgcggaggggagtaggtgtggttgcactcgagctggaatttgggcccgcgggcacagacggcgccgatgccgaaggggtaggggatgctgatgttgccgcacttgtcagggcagccaggcaatggctgagccgacgctggtgtcgccggcgccagggccatgcctaacagcaagactacggctgagatggcgacacccggctgcaggtgccttatctctgacatcctaccttagctaactctttgcccgtttctctgcttgcatcgcatgctggtttccgaataaatatagcgcgcttagttggagctggagccttggaggatcggaaaggaagatgcgtgctaggctcccggtcatcgttgaagaggtcgtttgattggtttttggggtcgacgtcactgttgcgtcgtcggtaaagcatggagccgggcatatgggcatgtgttccacttgcactgtcgcgtgggtcacttgcactgacaagaatttgggagccgagcatctgttccactttgcactgttttggtccagtcaactgccttgcctattgccaatttgcccttcttttttccttctgaaaaggatagtccccgcgagattccttttgagtctactgcatgtctgcattgtaatggatgaaggcatgtgttgtatactgtaagttggtggataaacaattgaacgctatgacgacgtctcaacctcacggtggtagaggaagccaaatggtatctgtcggctggttacctaactacgatagttgagtatacaagattcagcttataaggtagacacgagtgagaaatgccagggtcttctggctagctccacaaggtggtgggctagacaacctgggttcaaagtctcacaacttctaattatttgatattaggtccttccctaatattcgagtctcttggtagacatgagtatgggggtagaaaagtgagaaacaactattttatctaatcctattcagaaatgctataccacgggataccgtcccgagtgcgtgggacgatatcgcctcctcccgacggggcgagatggcaagagaatgagtatgttcacggcgagtaggtggcaagacgacatgatgatggcttcatggtcgcggtcgccgcctgctcatcgctactgcctatgaccgctccgatgcgaacactcggttatgtggggtgtggacggtggaggatgcggccccggtgacgagctccggcgtggggcatggacggcggaggatgcgaccgccggcgatgagctctggcgtggatgttgacgaaaaaaatcgaacacactagcctaggagatctgcttagctcctgtgcaggtccaaaggttgatgagatgcgggcgtgccagtcagtttgatcctgcaactgacaagatatgcaaatagtagatcaaaacagtcgatcggctgacaagccgatggagcaatctcagccgatatcgataatagctaatgccaataccagccgatagcgatagggttttgatagatcggctatatgtccaatgtagatgatgatataaaggcaatcggctgatgataatataatattgcaatataatctagtataaaccaatcggctagcaatgatatgataaataagcatcgatccgaggtttaaagcacacatcggctggaggtccgatgtcatgaaatctacaagattagattaaacagtgaaacctttgttgtcatcggctaaatccaatttatatgtatatgcaatcattatgagccgatgcaacatccagataactcaccggctgaaaccccgatgaaacccttattagcaattaagaagcaggctagagattatggttctaagcacgacttagtagatcaaacttaactgatgcagcactaagtatgaaaagaaacataatacctagacaatcaagccgttgactgagttttcagggtggtagatgtctaagctaatctaatctagcaacgcgatttagctgataccggcagaaaccctaaaatgagaagcagccgatagagctaaattgacatgctaagactagattaacagagacatgataaataggtaggcaaatatatcatccaaaccagagcaatccaagaggtcgaatgtactgatgcagccttgaacaacgtcgacgtagacgatacaattgcctggaccggcggaacattggacttatcccttcgccggagatcgaagacgatgcagccccgcgtcgggtgccaagtcccaccggaacttaaaaacaaaagtagaagtaaaaagggtggcgatgcgccgaattgtattgatcgtgaagatattacatagaccccggtgtgtacatatttatacccatgggttgatacaagtccttatcggacaataaacacactttcctaaagataaaaggaaactaacaaattattcctaattaatagataaactgccatgccgcatcctctttaaactctgtcacttagggataagcttcctttagtagatttatttccttaaccgaatatagcaggaatccgactattggcgacttgataactcctatcggctgattccgagatgctgcagccgataatgattctcagccgatgacgtctttgccgattaccaaatttcactgttaacagtggaacatggatagcggaggatgtcgtggctgcaccggggatgagctccggcgtggaacatggatggcggaggatgtcgtggtcgcgctagcgacgagcccggcgtagggcgaggcagcggaggacgcggccgccggcgatgagctccggcgtggaacatggatggcggaggatgtcgatctccggcatgggacgtgaggccgccgccgccgagctccagcgtggggagtgacggtaaaggacttgctcaaacgcggaggacacggccaccgacgatgatgccttggtgcctggctcctgatacccagtagaatcacctgatatcagtcggtatcgatctggtatcaacgagaataagtcaataccaagtatcacatgatacctcgtaagtataatcacatgatacctgataggaatcgtctaataccttgcaagtatcatttgatacgtggtagaaatcgcatgatatctaataggtatcatgtcctgatacctaaccggtatcatcccgctcgaacgggattccgttgtaaagcatccccctattcagatttagatcttcaatgtgaaaaatgaccctactatatttatatttatatttattgatccgggatgtgtattacaccaagtgaaaagggagtaggtagcttgtctagtccaccagacagtagacttattccatctcgtacagtttcggcccagttcgctcatcgcaaagagcctaaacaaaagggcccaatactaggccttctcctctctaatggccttccaacaaggctcaatgtgtctcgagggccttcagcccttcacgtatcatcctccccacccactctctctctctctctctctctctctctctctgtctcaagcaggtcagcggccggcggctggaacccttcctcccgtgcctccgccggcgtcgtcggaggcgcagactgtcattgtctccgccacagccgccatacatggtgtctaccagaagtcctccgttccttccatcctctgggagctgggagggagctgtccgctacgccatccgcaggctgttcctactccgccgccgactccatctggtctggtgagcgcgtcgcaaaattacgaataactctactaatttggtatggttcttgtcaaatcaggcatgcagagatgacctactctgtgtagaagaaaaaaaaatcctgtcagggacgatcgcctcccttcattggacgaccaactctaggagtgtgatggtcctgacccatacacggcggtatttggggagaaatttccccatgacaatccaatgtaactcgctttacagtatatatatctttgattttgtggcaagtccttatcttcttatttaaatgtttctatttaatgatcatgagttgtctatacatcatgttgttttcaccttttcttttaagagaagaacggacatgaacctttcaatactcatagtgacataccattcttctctatcgtctatgcaatttcttgcttttatattacagaacacataaatttcttggtcgttctttggttgcaccccatggatgtgttttcatattacatagaaaagaatttgtatgtgaattcattgatttataaaagattaacgcaaacaacattatctacaagctaaatgtatatgtacttccttcttccagatcaagaacatcatgctgcctgaattggtaatttggattttgatgttcaatgccaagcaagctttgattctcctcagcattacctttagcttcagcccaagggtgctgctggtatctcctcaacatctccaacctctctgctacctctttcatcgttggtcgttcttcaccgttcatgcttaggcatcgcatgaggaggtctgcaatctctgttgccatttcgtcgttcatctctttcctcacttggctgtccataagctctcgatgacgaccagccttcactgctgtggtgaagcgtgacaccaagctcatgtcttcctctggcccgtctaggtacaatgccttcttcctggttagaagctccagcacgacaacaccaaaactgtagacatcgctcttatcggttaactggcatgtcattaggtactcagggtccaagtacccacaagttccctgcaccaacgtggcaattgcagcctcatcagttggtgctagtttggatgctccaaaatctgcaactttggcgttgagcttgtcatcaagtaggatgttagccgtcttgacatctccatggaggattggtggagaagctgatgaatgcatgtaggcgagcgcctcggcggactttgcggctatccgaagacggttatcaagtgctatgtcagttgtgggttccttgccatggatgtagtggtagagggtgccgtttgagacaaattcatagactaacatgggcacttctacctcgaggcagcaaccgagcagcttgacgacattcctgtgattgatctgggagagaataaacatttctctagcaaattccttggtttgagcctcctccatcatcttggacttcttgatggccaccaccatgttgtcctccaggacacccttgtagacaacaccgtgaccgccgcggccgagaacacggtcagcggcgaagttgttggtggccttcttgagctcttccgtggaaaatattttgaacccaccagtgcctccaccagagtgcatctgctgctggaggatcactccaccgttctgctcgaagaatctttgctttgttctgatgagcttcctcttctggagccccaagtacaaccaaaagcacatgaacaccgacaagaacacaccaacgctgacccctgaagatggcattgcaatgtcactcatcagaaatcggagaatcaatagagagaaaggtgcattagggtgtgtttggttgctggccacactttgccacaactaacattaggtaagttgtagcagccacaaaagtgtggtggacaaattgctagccacaaaatgtgttaaagttggcaaaaaaaattaagtctatgacatgtaggacatggtattgaaaaaatgtggcaagtcacaactgtggcagtgaaacaaacatatacctaacacactgtggcagtcaaaagtgtggtgtggccatgaaccaaacacctccttagtgtctcaaaattacctgtgactattttcagtgctaatgtgaacttgtcgtttggacggcaatcattttttatggcatctccgctgaatccatgagggcaatcacacttatagcctcccagcagatttgtgcagactccgtggcatgggtacttgtctaagtgttggcactcgtcaatatcttggaagaggaaaaacaaactcatcacttcttgtcagaatgattgttatttatttgagggcagagaatataagaatggcgagcaaatgaacaatcctcaatgttaacttgataaccaatatctgcattgtattaaggtgtctagtattgtatacctgtgcatccaccgtcaaggtaggggttgccgtcgtagccattggagcacttgcagcggtatccgacaccattggtggagtcgacgcaatcgctgttggtgctcctgcacccgtagtccgtcctgttgcgcttggcgatgtcgcagttggcgacgttccggatggcccagtcgagcacgacggggacggcgaagtcgtcggtccggttgaagtcggcgctgtcccggtaggtggtgtcgacccacctgtcctccaccacgaacgcgtaccggcaagaagtcgtgttctcgcggaagattctcccctgggcttcctggaagccttgaacggacgcctcgtagtaggtgacattgggtggtatcctgctctggcagcacccaacgccggtgcacgccgccggcgacacggagttccactgcgacggtcggcagacggacgtgcagccggtgatgtagtagcccgcgtcgtcgctgaggtagccgaggttggggcagccgagcgcgacgaagcggttcctcgcggcggatacgcggtaggtgttgctgccaaggagggacaggtacaccgtgtagttacgggagttgtcgctgacgtagctctcgttgctgctgtagcactggcggaacacgttgacgagagctacggcctcgccgtcggcgatggacaggctggccagattcagccggcgcccggccaagatcgatgtaggcgtggggagtggagggaagaaggtgaggcgcggagggaagtagctgtggttgcagaagagctcgtagccgaagtcgcgggcgcagcgggcgccgatgccgaaggggtagggaacgctgatgttgccgcacctgtcggggcagcccggcaatggctgacccgacgctggtctcaccggcgccagggcgacgactaacagtaacagcaacactacgacgcctaagctggaaaacacccccatttctgaactctgcattgcttctcgttactatgacgctggtttcagcatgcataaatagatcgtattgacatgacatgagtatatggcacgtgcacttcgttctttaatttagttggagaattgtaaaggaagatgcatttgcatatgctcgttgacgagctaggttggtcgcttcggcggtcgacgactcgacacgtcctccgaaccggactgttgcgtcgtacgacaaggaaggagctaagctgttccacttgtaatgctgggtgggtcagaaaagcacgaatccgagcatgtgttccacttgcactgttggtccagtcaattgccttgcccatttgccaatccttttcttcagtggaggacagtccccgcgggattcatttgttcagaaatggaaacgtatttttttttttgcgaacgtaaatggaaacggatttgcagtggtctattccttccatcccaaaacaaaacaacatgggatggaatgtaataatctagtacaagtacaatgaatctaacattggtttatctagattctcgttgtgctagattatattatatcttatcttaggttggaatattttgatatgaagggagtagtgatttagtagtggataccatcgtatatacagcgttcagaaagataacctggcaaacaatgattttattctacttcctccgtttcatattataataagactttttagcattacccacgttcatatatatgttaatgaagctaaatatatatgtctaaattcattaaaacacacacatatatatgtaagcaatactagcaagttataatatgaaatggagggagtagaatctaaaatgacgcctaagtgtcgtcttgtaaaatttaagggcaaccaacagtaatgatttttggaggctggattcgcccttgatcactgatcaattgtccctcggctatttctgttgatttcttacttcctgctgtgttgccggttttctctttgctcctcgttacaaagctactctaaactaatgtagtacgaccggcctgtatatatgctacggagtacgtacgtttatgcggttaattatacaagagctgatggccgagtaattaaggccaggtttgatttcatgggctaatgtttagccctcaccttttagcctcaaattagcccacaagaatctaaacaggtaggctaattttgggctaatatgaattagcccccctcaaaacattagtctctccaaatatgttaatggggctaattttgtgtggggaccataaaaaaacagctctctctctccttctctctcctctctttttactctctctccaccttttagccttgcccatagatccaaacatacgattctaggctaatgtttagcctaccaattcatgactaaatattaccttttaacattagctctaggctaatcttacataagtattgtaaagaagcagcctgcactcgacaaagctatttaattgatttactcgaatgatgcggaaaagcagggtgctgactgctgactcctacatgctctgaccagtcaactgcactgctatttgccaatttttttcttcccacaagagaaacgaaaattccagaatttttttcggttttagatttttttttaatatttacagaaataatctatcgaccaaaaaaattacagaaatagcccctgccgcccacctctggggcagcaagctgacgtggcaaacgggggaggaacgggcggtgacggagggagggtttttttgcaggaaaacccttgccgggcggcaaggggcccgaatgcaaaaaagccagtcggggccggctattttgcaggcggccccttgccgccctctggccgggcggcaggcctcgctgcctataaaaggcctgctgcccagcccccagccctcattcttctctcctcaattccagtgaaaaaaaaagaagagaggggaggagaagagaagaaggggcgaagccctgccggattcagacgccgatttcaggtaatattcatagatcctatatgtgactattgagttaaatagtgtgtattctttaaaaatttgtttgaataaatgcattatatttttagggttttagttgtactaatctagaagtgcgtattgtagatatcggtaactacgtagatctgctaatttggaattaatacattaccgttgcattggcttacacaagaagatattacgttgtagatgtttattgcatgaaagagtaatatgatctagttatttcgttgacagatatgtcgaacaaacaaatattccaagtttaccatggaccaggaaacgtccgttacgggccaactggggtagatctgtcagattttattgtatcagaaaggggaattgatagaccggctgagaggagtgtaccttctataaaaggatggttaatgaggggcttgagagttgatccacaaacaagtgacataacaatcaatgttatagtaagtcgggcaactgagggtttttattgggaactaatgccagttcaaaactctcgagtgtggagatggtatttggaaaatgcattgcaatgtgggtggcctctagctttggttccgtttgttcacccgaaggatccaggtgtgcagacgaacatggatgatggtgagggaccaagtgctgaagtaaacgagacttctgtggaggaggtcaacgcacgagaggacgggggcgtagtagctccagtgggcattcaaccaggtggagtggccgacgagggggagactgtcggtgccattgtggatgaaatggagagggaggattctgacaacgagcgtgtagaggaaggtgattcgtcagatgatgagacggatattaatccagcagaatgggctagtgaggatttttctgggctgatcgtctctgaagaggatagtgtgagatgggagtacaaagaaaatgaggttattcagggagcgatttatagtagagcagaagatatgaaggaggcggtaaaacattttgcagtgtcacttcatagagagttttgggttgccaagtcgaaccggtcgcaatatgaagttcggtgtgttaaggaaaaagatggttgtccctggagagtgcacacgtataaggggaaatggaaggattattggacagtgtcagttgttaccaagcatacatgttttctacctggtgttcagaaataccacaggaacattacatgtgcatttgttgcatctgagatgtatgcgcatgtcatcgataatctcacatatgaaccaaggtcaataatctgacacattgaagagacatacaagtatactattagctatgccaaggcctggagggccaaacagaaaataatagagatgagatttggaacttacgaagcttcgtatgacaatttgccacgcctgcttggtgttatcgaggaaagaaaccctgggagctcttacgaagtgaagaaattcccctcaattgaacatcctggcaagagtgtgctgcaaagggcgttcttagctctacatgcatgcaagatggcattcgtgaactgtcgtcctgttctctgcattgatgggacattcttgataggaaagtatcggggccagatactaacagcaataggggtagatgggaacaatcaggtattgcccttggcatttgcttttgttgagagtgagaataccgacagctggtactggttcctgaaattggttaaaacaaaagttgttggtatgaggccaaatgtatgcctgatacatgataggcacgctggcattctgcgagcgataggagagttgcagtttgggagtatggaacgaggataccccggtgtttgggaagatgtacagagtaggtggtgcatgcgtcatatgggagctaattttttcaagcaattcaagaacaaggagctcatgaacatgttcaagaggctgtgcaatcagaaccaggagaaaaaattcaatgagctttggaagagattagatgagttgacagccaaatgcagtgatcagcgtgcagcggctccatcgaccgccgttgctgaccctcctcaagctcttggacctctcccaacggatagtccaacattggttagaagaactggattggagattcagaaattttctcagtggattctgcatgaacgaaaagagaaatgggccaaggcgtatgacacaggtggtgctagatatggaataatgacaacaaatttggcagaagtttacaactgggtgatgcgcggtgtccgtggactgccactagttggcatagtggagttcattttacatgggacatgcaggtattttagggatcggttccaggtagttcttccctctatgccgaacaacagcattttgtttggagctttcatgcagaaaaagctagaggagttgcgtaaaaaggccatgaaacatcgagctctagtgcaaggtacccaacagcacaggtttgagatactatgtcaagataaggcaggcaggggtatctaccgcaagagagtgaagcaggagtgtgttctcaaagccgacggcacatgtcattgctcttgtgcaaagccgaagctgctccacaggccatgcacccatgtcattgctgccgcagcggagtgtggcataccagatgcagtatatgtgtcacagtacttcagtaagcaagcaatatatcatacgtggagcggcgagatttatgggttcggcatagctggggagttcacagagactaacgatgaagtactcaatattcctgacccatcgaagctccgaggcaaggctggaaggaggaggactcgtcgcatccgcaacgatatggacgagtcggaggctggcagggtgaagcgttgcagcaaatgcgatgaacatgggcacacctacaagcattgtcctaaagacaaggagaaaccaagtgcggcggaggcaggactatcaggatcagcagcagatggagctcgccctacgggtgaaggcactacctccactcgaccacgtcctaggcgtcgtcgtgccacgtctagctacgtggtgtagttcttatgttctatgtcggcatgtggatttgcttgtaattcgtttcgaacttatcgatgtgtttatgtttcgtcgtgtaatgtcagacttcggcatgtcatgtctttaggtctcgtgatgtaacgtcggactaaggcgcctaacgtctttaggtatgctgatgtatgtcagacttcgacacgtaatgttatgttatattattgaactctacatatatgttaaattgcacgtcatcattatgtaccattagtaacgtttgctatatttaaatagcctgtactcttgttgtacataattaatctcatgattttattactatttcataattttgcaagttatcttttgttttacagtactattttttgaattgttctaacacgaaacactatatttttcagagatggcacgtcaggatacacctcagttgttggacccggcgatagatcaccgacaccggtctcaccttactgcggtgcagggggctcagcttgggacgttccgggcacggacgtgcggtgagctactcacggttcacgactcctttgtcgagaggtacgaacaatgttttactataagttagttgcactgtaatattttttataatgacatattaatttgttattgcaggctacgtgaggccggcctcctaccgatgtgtcggctggtggaggctgcggccggcgacgcggacccggccagacgatggacggtggacaggtccctcctagcagctttggtcgatcgatggaggccagagacgcacacttttcacttgccgtgcggtgaggtagcccctaccctacaggacgtatcgtacttgttggggctaccgctcgcgggagacgctgttgggccagtgaccacggctgtggactggcaggacgatctgacggcacgtttcgcactagtacagcgtgcaccgcacctcccgctcgagccgttggcacaccaccgcaacaccagacctacgaagaggtggctgcttcagttcaccgtgagtgtttttgtaccgaaatgacaatcgtattacatatttagtccgcagttaaggtgcctaacattttatcgacggcttgcaggttgagcagctacaggcggaggccgacgagtactcctacagccgatgtttggaggcgtacttgctctggctttttggctgggtgatgttctgtggcggtcatgggcacgcggtcgacaagggactcgtgcactacgccaggagcatcgccgacgccgcggtaggcgaggtgcctcagtggagctggggttccgcgttgttggcggctctgtaccgtgcactttgtgagtcttgcacgaagacggatcccagcgcgacctttggtgggtgccctctctttctttctatctgggcagctgagaggattgcgatcggccgccctgaggtggaccagcacgcgtacgaggagtcactgtacgaggagcgaccagaggtcgactaccctacgatgggtactctgtggtgccgtcgtcaggtacgttgcatcgatcttatcgtattgttaagttaattgctaagttcattgtacatcacatcgatcgtctcgtattgcagcgccgatgggctcacgtccaggttaggcggtcgtatcctgagtttgttatggagttcgaccgccttctgccgactgacgtcgtgtgggagccctacagtgcagcggctacccaggctcgtgcgccgttgggtctgtccacactctgcaccagggaccaggcgtactggatgactacggttccgatggtcttcgacatctgcgttgagcctcacgcccctttccgcgtgatgcggcagttcggcttccatcagccctttccagtaccgtttccgaccaccgtcccagctgctgttcaccggtaagatcttgcactacgctttccgttgttgcattaaaatctgcctgttcacaataatttgtaacatctgtcgtttcacactaatattacacattaattcgcaggtactcgcgcaagggtcagcactcagctggcgactggcccgccaagttggcgacttttgttgaggactggttgctcgcaaccgaggaggtcgtggaccacgagggagagccacacactgaggagtcgtaccaggcctacctacgctggtaccagccacgcacccgtactagggtcaccttcgctcccttggagcagcagccccacgttgcgagcactagagacctctatgccaggcaccgcgaccaggacttcgctcgtgctgtgagtaccctgcatcgcaccattcctttatgttttcatgtctttctcttcgtcaaattttacgaatatttacgaacaaattaaccatgcaggtcgacgacatcaaccgggtcgtcgttgatggttcaatgacgatccaacgtttaggcgcggggattccggtacccgtagaggagcacctgacgacgtacacgcggatggtggagtcgatgcgctcgattctccgagttctcacctgtcgtgcagacgacgttgctcgggcagacgcagctgtacagcggccacccgtaccaactggtccccgtccagctgcgcacgttcctaggccgaccccccctctgcacggaggtaagtatttttattactatttctgtacatgcctcgcacatataagtgagccgtttcacttgccgattgcttcagggtttcgtgcaccgttcagcaccccgccttcctcagctaggccttatgttgtgcccccacaggtacttaaaaaaacaacattacttcgacaatcaatttacatacattttatgtcttagcttacaagggtcccgttgtcgatgtgtaggtttcgcccagttcgctatgacgcaggccgcccacttctcccaggctgtagggtcagcgtctcaggcagctgtgtcgacctcgcactcagcgcagttctggcagtacaccgggacttcgtcacaggcagtcggcacgtcgagtcagggtccaccactggaccatgctgggacctcgtcggaccacttgttgccttccaccttcctcttcgacatcaccgacttcgacttcgcttcaggctcgacagaggacgtcatcggcccctcacagctgggaggcgcaccgccggtgcagacgcaggaccaggcgcaggccactcctccgcgggacactcgtgctacccgtgctgtgccaccggatcgtttcacctactcccaggaccacgtgcgagcacaggcccggaggaccaagcgtggtcgcggcgcggggcagggccagtagagcagtcttctctttgtttacttgcttcactttccagtactgtatgcttgtgtaatgactacgttgttgttatatgtgcacgatacctttcggcgcatgcacgatacctttcggcgcatgcacgactactttctgccgcaccgatgcagcctcctttattcgcgtgtgatacgagtatttgcccgccatttggcgcatacgaccaatgtaactgtcggcgccgatcatgcatgtatctttcggcgccaatcaggcgtacccaccataccccaccacgttcacatgtcaggggtatcactcgattttttgcgcctatataagtcgccttaacgagtgaggcctcacaatctttcagaactcagtcacattcagtactctcttccccacttgcttcattacaaatccgaccggctttcgtcaatggctagacgccgaggtgttgaggatctaaactggcgtagcgatccttgtgtatacctactaccaccttggtgtcagcgtcctctctgcctatgcggtgatcgatgccaactaatggcttcgaggaatcctgatattcgaggaaggcgcttttttaggtgccctaactatgaccgtgaggtattttattatctgcgtatgcttattcattccgtatgggcaatcgctttattcttcgtaacactactctattcggcagacccgcactacggcttgcgcatacatcgagtgggtcgatacagaaaatcccgttctcgacctaaccacttgtttacaagaaggtcgctggtatttcgcatccgaaagtactgagcaatacttacagagaaaagcggcttataaacgacaatgtcgtgaacaacagagcgactggcgggtgctaactacggcactccctccatgggaagcccgtccaagatgcaggtgtggtgatcgttgtcaggttcttcattccataaatcctacaacattgggtcgaaggttctttgtttgtccaaatattcttgacgacgatttcatggtaagaatattttgattacatgaatccttattttctcacaacatttactaactttgcttgctttacatctattcattcctcccaggaaccaccaaggagatgtcaatacagagaatggatagacaccagaagggttctaactccacctagccgtgttgtgcagcttgaactaccagagcaatacagggttactaaagcgcggtttgagagaggagagggatcctcacgtaggggttagctattatcggacaacttggcatattgaaatttctactgtcatgcttccctgtcccattactacatcgtcgttgtgttcaactattgcactacctccctcctagttcgaatctaatatcatctatgtaaccgcaatgcaaatagttgtatcatgttcaaatttaacataattcttcatgtaacataattctccttgtttaagtccatataatgtttctacgacccagactgcgataggcctatataaattatccgagtactaatacgtcgaataaggtacaaaataatacctcacttaacatatgaaattgcgcaactcaatacatttttataacaatattaacaagttttaccaataaatacttctttatttattattaacataacatagaaaaatcttttggccgtactttttcatctgggtcccttgccgccccaatagagggcggcaagggacccagatgaaaaaagtacggccgcaagctctttatgggcggccaaaattgcaattagccccttgccgccctctgtacgggcggcaagggcctaatcgcaattttggccgacggcggcagacggcgcggtcgacccaccgtctgccacgtcagcttgccgcccaccattagggcggcaggggctatttctgcaatttttttggtcgatagattatttctgtaaatattaaaaaaaaatctaaaaacgaaaaaaattcgaaaattccatgtgggacttatgagaaaagacggcccagattcattagagcccaggacaagggaggccaccgtgcacatttgccgtcctagacctattccagcccaacccaccacgcattcgcaggaatctcgtgctcaggcctaattcggctcgcgcgttagcgagagcccagtttaggcccaccatatcaacctagtgcaaattccatttcggcccaactagtttgtcactgtaaaggggcctaaaaatgggctaaacgtgttagccttgaaacctttgtcatctctctcaaccacgacagcagcgagccggcggccggaacccctccctccgccgtcgccgccgccaccgccgtcgtcgggggcgatcagatccgcaccgcacgcggaggatatctataccgccgccggaggtgttgacttcctgggacgccctccgccgggtttcccacgctctgcgcctctgcctccgtcaggcctcagggtgagtgcgttgccaaattatggttagctctactaatctttcttcactctagtctctactggtcgtcttctctactcctgtccgtgtgcttcagtcggtctcacccgcacatcgcagtgtgggctagggctagcatcatgaatcttttcttacttgcttgattagtgaagtgcattggtactgtgccagtcaaatcggagctcacccacacccactctttaattaacaaattttcctctcatggatgattgccttccttcatttcattggacggaccaactcttagagtgtgatggtctcctgaccatacacgacgatagctaggggtaagcctgctaatggactggattggaatgggttaaatggattggttttgtatttgggtttgctttggttggattgaaatgggcacacgctataaatggctcagcacggaaagctgagccatgatgacctgatatgtattcacttagcaggggaagcttgaatttgctattacaaggtagcaaattcttcggatggctcatgatccattgaaaaatccttactgcagacaactttcagattcgggaatgggataacagtgagatttgccccttttatggtatagaaccagagactacccaccacctcctcatagattattcattcacaagacaagtatggagctccatatggaggaaattgggcctccacacgccttcaccatccctcttcactggagacatgctaggttcgtgggaagcttgcaggaaagaaatggtacgcaacttcgatggccttttcatccacacggctcggggtatttggttacaaacgaatggaataatctttaatgggatatacaattccgtgcttcaggtagttgattccatcatagatatgtgcaaggagtttgatgaagcccaaataacttagatgatttttctgcgcgtcttgttattagttgctttgcattaccttaaacttatgtgcctgccctccacgctctccagggatggaggttgtatgttgtaaaactttgtttttccccctacttaattgaaattggcagagctccctccttccccttaaaaaaaaacctctatccaactaaaactccaaaaggtatataaaattacatagagatggtatgcaaatctcttatgttcttacttaaatgcttctatttaatgatcacatgttgtctttacatgatgttgttttcaccctttcttttaacagaagaacaaacaagaaccatttaatactcacagttacaaatcattggtctatatagtctatgcagtttctttttttttattacagccacataaattccttggtggttatttcattgcaatccatatgagtgtttccattcatgttacacggaaaagaattttaaagattttgtatcagaacagattgatttaccaaagattgacacgatcagcatgatctataagctaaatgtatatgcattgccttcttccagacccaggacatcttgttgcctgagttggtaatttgcattattttgttccatgccgagcaagctctgaatctcctcctcattgccttcagctttagcccaagggtgctgctgatatcttctcagcgattccagcctctcagctacctctttcatcgccggtcgttcttccccaatcatgcttaggcatctcattaggaggtatgtaatctcttggagcatttcgtcactcagctcattccttacttggctgtccagaagctcttgatgacgaccaaccttcacagctgtggtgaaacatgacaccaggcacctgtcttcctctggtccgtcaaggtataatgccttctttcttgttagaagctccagcacgacaacaccaaaactatatacgtcactcttatcggtcagctggcatgtcattaggtattcggggtccaagtatccacaagttccttgcaccaatgttgcaatctcagcctcatcagttggtgctagttttgatgctccaaaatctgaaactttggcgttgaacttatcatcaagcaggatgtttgctgtcttgacatcaccatggaggattggtggtgaagccgacgaatgcatgtaggagagcgcctcggcagactctgccgctatccgaagacgggtatcaagtgctatgtcaacttcggggtctttgccatggatgtagtggtagaaggtaccgtttgagacaaattcatagaccaacataggcacttcaacttcaaggcaacatccaagcagcttgacgacgtttcgatggttgatctgggagaggatgaacatttctcttgcaaactccttggtttgggcctcctccatcatctttgacttcttgatggccaccaccgtgttgtcctccaggacgcctttgtaaacaatgccatgccctccatgaccaagaatgcgatcaactgcgaagttgttggtcgcattcttgagttcttccgtggagaaaatcttgaacccacccactccaccgccagcgccaccataggaacgcatctgctgttgcagaaagattccaccgttttgctcaaagaacttttgcctcgttctgatgagtttcctcttctgaagcctaaggcggagccagaatgccatgaacaccgacatgaacacgccgaggccaacccctaatcataacgttgcatatacataggctaattttaggaagaaattgcagactaaaaccattgaaagttaagataattgcatacatgatgggttagttcgatcattaattacctgtaacagccttgagagcaaacgtgaacttgtccttagggcggcaaacattcttctcgtggacatttccaatagtcccccgagggcataagcaagtataccctcctatcgtatttgtgcagtctccgtagcatccgtatttctctttgtcttggcactcgtcgatgtcttccgtttgcccagaaaaatcatcaaactgatcagactgcagcattatatatccaagaaaatatacagtcccatcttttcacttatgtttatgattgttagttaaaatttgaatttataaccttaaatttaaagttgattttgaggttttttcgtcgaagtttatttttcagtctttgcttttaaagtgttaaaaacacggacataaaagttttatttacaaattatttttcgtttacaaatatgccgtttggtttattccgtgaataaccaaacgatgggagccatagagacaagtaacagttgattgggttaaaatgattacctgtgcatccgctgtcgaggtaggggttaccctggtagccattggagcacctgcaccggtatccgacgccgtcgctggcgtcgaagcactcgctccactcgctccggcacgcgtacttggtggcgttgcgcttggcgaccctgcagttgcggacgttccgaatcgcccagtcgagcacgacgggcacgtcgaagtcgtcggttcggttgaagtaggcgcgatagctgtacgtggtgtcgatccacttgtcctccaccaggaacatgtaattgcatgccgtcgagttgaggcgatggtagatgggttccacgcggttctcctctgccgacttattcaagctgaggatgtaaggcttgtagaagttgagaggccgaggtatggtgttctggcagccataccaggtgatcattaccggcttgcgacttgcggcacatggatatgcagccgctgacatagtactcctcggcgtcaaccaggtaaccgaggacggggcaaccgagcacgacgaacctgttcctcgccgcggagaagcggtaggcggtgctacggccgaaagacacatcagacaacggcagctggccctggctgtccctcctcaaagcattgtaactgatgtaggttgtgccgtcgctgcaatagtttctggcgttgatgagggcccgggcctcgccgtcgagggacaggctaaccagctcgacttcagacacgaagaggcgcggaggcgagtaggcgtggttgcaaacgagccggaagttgaagtcgcgggcacagcgggagccaatgccgaatgggtaggggatgctggtgttcccgcacttgtcggggcagcccgccggctgctgagcccacgctggtgccaccggcgccaggcagacgatcaagacgacgagggccgcaccctgcaggcacagggtagtggtagccatttctaacatggtagctaaactctagcctcgttgctctacttgctaatgttgccggctgtcatacccatataaatactccagttaggagtagatgatagtgctgcttatgacgacatactacctcggttgtcctttttaattcatttgacttatataaaaatattgttgcaaatagacaaatgcttaaagtacttttgatggcattatttagctgagtaaataaataaataaataatactgttagttgaagattaagaaaaaaaaattaattgtcatatattaagccagcttcattgacgaggttgacattggtctgaacgcgagcgcgcgcttcgtcgacggtcgacatcaccgaagttcactgattttactgctggctcggttgtttcggaattgggaggccgctctggtgcacgttgtacctcggtcctttaattgacttccttcccacctgaacttgtcctgctaaatactactcactccatcccaaaatataaatatttttaaatcttgacatggtttctgatatgctactttcactaacaatatctataaaagtatgatgttttaaataaaaaatattacatgttatgatagtttatttaatgataaatctagtaaaatcaatttatcttttttatttttttctattaatgattaaagttaaaaatatttgacttgtcactatgctaaaaatgcttatatttttggacggagggagtactgcgcatcatgttgtttaatttgcgcgtacctgtacgtgtaaacaggtttccccaatgcgaacaacctccatcccaaaaaaaggcatataggactggatgtgacacattctaatataataaatctagatagagatatattcagatttatagtagtaggatatgtcatattcagtactaggttgattttttatgggatgtcccaatacgtatgtggtagtgcgtttgtgaactgtcggctctcttcatgtaaagtcaaataagaaagatctttcatctaatgacgagagttgtttttaaactttcaagagaacgttctatcgttatttatatgttaaatagttgcatactattagtaaaatattttttaatcatccacgtcacattaatactccgctaatacaaacattactattttgatatgcttttttaaaactacgcatttctcgcttatatagtgtgtataaatatgtccttttcttctctttcctcatttcatgcttactagcaaaatacccatattttgctattaacagaagaatcataatatgccatagcaaaatattttttttatcaaatatcttaatatcacttgtttgctcatttgattatatgttatccatttgtttgaactaaatagtggatcatttcacaatattaataaatatcaggggacaatttgtaaaaactgcaaaaacaatatgaacagttgggtagcaaatttactgccatcaccattagagtcttttaaaggagtacatatattctcacgtaatcttttattcgttgtggacatattattcaatattagggaaaccattctagttagagaaatgagaattgagattgctctgctacagcttaatctccctgctaggctgctacttgttaattactacaggaacatagtgattttacgaaaaacatctgaaatttcaacgttttaagggagccaagtgactacgtggcatatgcatggtcatcatctctgcgtggacctcgtccgtgagaacgcatggccagcatcgcgcctcaactcgatcgatatcgatcgtgtcgaacatgacgcaaccagaagtgaagtgtagcgcatggattcaagtggggaaggagctaaatgagtgaggtagtgacgctgtgaagcgtctagcttttactgaaatccaacacgcataagcataattaagggaaacaatggtccagcttttactgaaatccaccagggcccgatgggtttgtgtgcaaatccaagggctgcagcgacttggaatgctctgactgtttcgtggttgaaacttgaaggttagcttagatagttttcagctaaatacgtgtcagcgtaaggcctttgtagtcttgctacaagctctatcttatcttacgcagttcctgtgttacacactcttcccctgtggtttctttataggaataaaaacaaaacggattcgaatggatagtgataataccatatcacaacccatatgttttaagtgtaggatcgtaaaaggtctttcccatctcaaaagctagtcattaaggtgaggggctcctccacttatatcttaggtcatttgtccttccacatccccaatctcctctttctcccccttcacacattggtgtccctcaaaagctagccattaaggtgattggtttctccacttatatcgccattaaggtgaggggcttccccacttatatcttaggtcctttgcccttccacatccccaatctcccccttctcccccttcacacattggtgtccctcagccccttcaccgtatccgggccccaccggcccacggtccatcaggtatacgggccccgcaggcacgcacagtccatcaggccttcacacactgtgtccatcggaccagagatgttaacctagcctggctctgacaccaattgtaggatcgtaaagggtctttcccatcccaaaagctagccattgaggtgaggggctcccccacttatatcttaggtcctttacccttccataaccaatgtgggactattcaacattaagaggattcgaagtgaatgcagagcagattgttttggacgtcgtaaatgatatggtattggtgtggattcggtttgaaaatatattgaaattgtcagttataacatgtatatgcaatcaatataacatcaagttagcgatacaacggacaacaatataattaaaatgaagcatccatccgaataacttatatgcttaagtgctaaataatatgaatatatgtatatctataatataaaaaaacagttaagcatgtgtgagatgagctctaaggagtctatgtgtgccatctcttgcagtatgcaacaaacaaaatggagttgtggattgacaatttcgaattgtccgacaaacggcctatcggataattcgatagaaatgtcggataatctgcgtctgctggattttagagataccatattcacatcaaaatccgcagtgtactatccacatccgccggattatgtaagaccataccatatcctcgtttttgacggatttggagtggatcgggtcagataatttgctcctcatttttatcacccctcttcttttctttctagaattttgtcagaatattaaaatggattatttgcttcacattttttaaaaatatttttgttgcattcttggatcgcttgttttaagttatttgttaagttcatttatcaaaatatttaatctatactataatcaagtagataatttgtagcaacaatccgttcaataatttatttttaattgcgccagttaagatgttgctatctatctctctttgcatcactctcttagttcaagcaatgataaagttgttttcaaacccctaagagagcaatcataaactctgataaaaacctttccttgttgaaaccatgagcatgtgcggctgcactactgcagctgtttgtttttttgaaaattcatcagagcaagtttaatagtatagccaactactagctccaattcatctgtagccaatctaatagctcattcatacaatagttacatactacactattaatacatggtcccacctgtcacacacacactgcgtcttggagtccgtgctacagctgactacaaatctatagcccgttgctcttctctctcctcatttatcttcttaaaatatgtttgtagctggcttatagcctgctattgtacctgctctcaggggggagagcttccccacctgaattcattaaagcagaaaagaggggaaaaatagttcagtttatcttattacatattaagagagtgaagggtggaagagaagaggaccttccaggatgaaattacatggctatcatctaatttaaaccgctcagcccagagagaggcctctgaaacacacatagcatatacataacatagggaagcttccttatgcctaaagaccaccccataacgatgattccatagacaccagaagcatagcaggtattacacccgaaagtgtttgctggggatttgaggaggtagaggaagatgcgccagctcgctcgtcaacgagatgttgatataaatgcgaaggttattccagaaggcatcagcaagggggcagtggaagcacatgtgcgaaaccgtttcctcagccaaattgcagaggtcacagttgggggcagacacgatgtttttcttatgaaggctctttttcgttggaagccgatctttagcaagaagccaggcaaagactgaaccttgagaggtgctttgttgtcccagataaacttctaattcgggcagagaggtgaaccactgcattgggcaagatagagctgacttgtcttcggaatgtcactggtattcttcgcccaactactgcagctgtggcacaaccacctcgcagcacagtagtttgtgtcatcgcagcagctatgctggctgcgttgcagcagctgcaatatgcagcggaacactgcctatgatagagagcacaacgtcccctcctttacccccagaccctagtagtaaaggtttcccgagaactctgcaaggataatcttctagttcgtaaaagaaaattgactctttttaacgtgctccaacataataaaatcctagccgatgattgttttgtgatttattttccaattaaaaatattttttctccttccacaaatgcatttatctaacaaggaaagtaataattacccttagtaaaatatgcatgtatatatatgcgtgcatgcatggatataaccaatggttgagaccatttaattttaaaaaaaatctgttttttgtttttttaaataatgaaaatggattacatcttcgtcccgtgccagtctcataaatctttttttttgtttttttaatatcccaaataaacataatgtatgccgtatgatttgcactagaaaattttaagttttaaatgactgcaattctgagtcgtgaattgttgctatgtaaaataatattgaaagaacatataatacaaaaggcataaatttcttttgataaatttgtcaaccggggatacccatagaccggacaaatggagtattggagtacgttggtacgagattctacacgatacgtcatcaaaacagaaaagagaccaggattatactggttcaaccccctcgtaaggtaatagccctaatccagtttatataagattgatatagaaaaccatagagtacaaagagaacagatgaacttgttgataacgactagattgtcacgccccgaactagtaccgaccggaactagcccgtgacgctccaaattaacctgttaatcgataccagtcccagaaaacagtgctggtatcacaggaagacggattatcacagcaacacaagtctctttattatagagtagaggtacagtcatgttgggctgcggacagatcccgagctcacaactgcattacaaaagggaaacggaagccaggacttggaccaaacaacacaggcgcgacttgggaactaggccgaaaccctaaaactcatcgtagccggcttgctcctggaagaactcctcatcagcaggatccgcttcatcttcttcagcaactgggggggattatttatataaagcaagggtgagtacgggagtactcagcaagctatgggaaataagtgtttaatacaggcttcaaagaaaggctgttgtttttgcaattgattttatttgaactcttttctaaaaacaactaagtgagtgcttctcaaacgacacgggtgagacagtgcgtctcgtccggtcggagtatgtgcaatgtatcagtctttagaattgaaacaaggttggcacccggccaacagcttttcaaacggccacccgggccaacaactttcaaacggccacccgggcctagctgatcccatcagctgcagatttttcaaacatcgaacccctttccacaacagcaatttcacaagcagtagtcaaacaaaactacgctaggaatcacttcacatccgcccatgaccgtgggcacggctgttcgaacagtttgttaacctctgcagagggggtacactttacccacacgacattactaacccggatcacccagcccgtggggatcggccacgtcgggagacctccaagctttcatgacaaggcatttccaaagccgacacaggtttaccatatgccgacgagaggggtcccagaccaacaacaggttaggtcccagaccatactgtgccaggaagcccaggggtcctccccgacaccaccccggcgaatccacatgtctctcggcatcaaggctcccctgataagctagttactcagccaggggtgtcccattccacccatgtggtcgtacttgtcttatgtttggatgaaattccaaggaaacggtccttaagtgcaagagcgggaaaccgtactcccagtacgttccccggtccgtggttttggaaattcatttagttcgcaagcaccgacccaggtgtcgggttttccaagtcttttgtaaaaccctagttttacccaagttgttaatcagatttttaagtttgaaggcgtccgtcgatacccgcacagggtgcacgaatatcgagacgcaactagatggttacaaggggacatgacataacaattaacaaatgaaagatcaaatgcaacaaattaggtaggtccgccaatctgccttgcagacgggacaacagattaagtgcgatcctatcaatgcataatatttttcaagcaacataattaaatttcaaatataggctcaagatgttcaaaggtggcttgccttgctcgagatctggagcttgatcctcgaaatcctcgcactgcgggtcttcgggctccgaaactacacgcgaagcggggcaactcaacaaacggcaaaaaaaaaataaagccctattgatgacctctaagcgtgccattagatagatctcgagatttgaggaattttggaagttgaacggagtcaaacggatttacggttgggaagatattgaatttctaagattattggatttttgtctaaaggaaaaggatttaattaaatcctttttggaaaagaaaagaaaagaaaagaaaagagggagggaaaatagacttttctcgggcggctagggcgcggcccaagggaaatggagcggaccggccgagctaaatgggccgaccggcccaaggcggcccaagacgcgcgcgtgcgcgggagggaggagagagagagccggtggaccgggctcaccgcgcgcggtcccgggtgggacccgcttgtcggtgacacggctcactgtgcggagcgagcacgcggcgtacgcgcgcgggcgggggaggaacgcggtgcatgcgcgcgggcccacgcgcagcctcacggctcgcggtggaacgcgctcacgggaggggctgaccggggtcggcccgtcccgacctcggctgagctggcaccgacgtggcgcctacgtggctgccacgcgggccggcgggaggtagacgacgacaccggccggaacggacgacggacgatagcggcgagcggcggagcgaaccacggcgatacaggcgaaagcgagcacaccgggtggttgcacgagacgaggggaaacgagccaacggctcggattcgccggaggaagcttgacggcggcgaatcgcggcggcggcaaccggcggggagggaagagggaaacggcgacgaggtcacgaagggccgattcccggcggtgagagcatctacgcggccacggaaatccgatgctagcgtcggattgggcggagctacgccgagcgaggccggcgacgagcgggtgctacggagctcgggcggcaacggcggcgagtacacggcgagcgacggcaacggtcggggcggcgccggctagctacggggaggctactcgtgctactacccgtgtctaaggggaggagatggagcgaggaggaagaacggagagaggcactaccgtgcgggtcggggtgctgtgacgagaggccgacggcgcgggagtaatctctccggcctcgggccggggaagaggaaggagagggcgcggccgaagtccccttccacgtccttgctcgtgccggctcctccgacacgcgcaacgacgaacggcgacggcgaaacagaggggcggcaatggcgcggaggtgaatgggagaggaaaggaaaaagggggggagctcgggtttataggatggcaatgtcggtttgggaaccgacttagggcggtcaaaggagagggctagcgctcggcggtcgcggccaaagcggcgacagggaggagggaggaggatgacgccggcgggaggaaaaaggggaaaagagggagagaaaagggggcttgtccccttgcctcttcgggaaaaggaggagggagcgggggcgtcgcggcagagggaggagggaggctctgcctccgtcccttggaggctagcgcgggagtggcgggaccgaggcgatgacgacggcgatgacggcggggcggtttggagcggcgcgacgacacgggcgacaggcgcgggctggcgcggcagagggtgacggcggcggcggcgaccaggaggtcggccactcggcacgcatgcgcgggaaacaacgggcggcgcggctgggcacgcgcaatggctcgcggggccgagcggttgcaggcgcggcagagcagcggggccgggtgacgcggacgacgcagacgacgcgactcgggcggggaaccacgcgggcgcgcgcgcgcgaacgacggcgcgcgggggctgtcttcgcaagcggggagctcgccagggagaggagaaggagagcgaggggaaggggcgctcggcgcggcgctcgcgcacacgcgcgccgccgcgcgcgcgtgcggggcggagcggagcggagggagagggggagagggagcgcgctgggggaggggagagggccgagggagaggggaagatgggccgagagaaattcggcccatcgaccccgggggaggcaaaatagacttttgcggaggaatttgatttggaaagatttggattcggatttgaacttgacgatagatcggggatttgagatctgagatggcacggacactagacaacaagcaaagaaacaaatttcacaattagggtttttaagagataatttttcccgctaggcgccatgacggaacgggcgctacatagatccctgtcgagattattcgacgagatctcccagcggcttcggcttgagtccttcggctttgtagactacggtgggtgtgttgacgctatgattcgatgatcctaaacccctctgggggtgtgccttttataccgtgagttgccttagtctccaagtagaactcgtagacaatgaaaccggcacgatatagaacagtcccggtccttttcgagtaggactctggtagtctccagcccgtaaggacattttccataatgtctatatttccttatcatgtacgaaaacatattgtaggatatgaggtatgtcaatccagtataattggtaaatcgtaggataagaagtactccctccatattttaatgtatgacgccgttgactttttaaccaacatttgaccactcgtcttatttaaaaattttatgcaaatataaaaatacttatgtcgtgtttaaagaacatttgatgataaatcaagtcacaataaaataaattataattacataaattttttaaataagacgaaaggtcaaacatttgtaaaaaagtcaacggcgtcatacattaaaatacggagggagtatgtattatttgtaacctgataaaatttcccatatgatttgattgtaaaaaaacaagaagttattcgttcgtgggctgtgtgagtcggggtggttgattaggcttatgggctttgctttgttaactggggtatatttagttcacgtcaaaattaaaagtttggttgaaattaaaacgatgtgatggaaaagttgaaagtttgtgtgtgtaggaaagttttgatataatggaaaagttgaaagtttaaagaaaaactttggatgtaaactcagcctgaagctcgagaaagcattgaaaatagactatcgaggcttactgagtacttctgactactggagcggcgtacatcctaaatatttcgcatatgttttgggtatgccacagtgcataccaggaacacacatctgtctcttggaataaattcccattaaatcttctaggaaagattaatcgaacgagagctaaagggttaaagaaacattagccatttgattaatgtataatggacggttaaaaatattttggtgtagctgaaaaaatccaagggtgcatagcaattgactgggccagactgatcacgtgcaagtggaacgcatgcacatctccctgcttttctgagaaatccttgcaaccacactggtcgtattcgtatcaatcaggcaggcagcttcgccaacgaagaagcacgtgtgcctaagcatacatcttcttttccactccaatcttccaactaatgaacgaatcgcgtgtacagtactccctccgtattttaatgtatgacgccgttgactttttaattaatgtttgaccatttgtcttattcaaattttttatacaaatacaaaaatacttatgtcatgcttaaagaatatttgatgataaatcaagtcacaataaaataaatgataattatataatttttttaataagacgaaaggtcaaacatttgttaaaaaatcaacggcgtcatacattaaaatacggagggagtaaaatctataatctatttatatggaaatcaggcggccatttaagcaaacagagcaacgagacaatagttttagctatcatgacagaaatgactaccagtgccctgcatctgcaggtgcttgccttaaccgtcttcctcgtctgcgcggcggcagtgacaccagcggcgtcggctcagcagcagcagctgccgggctgccccgacaagtgcggcgacatcagcatcccctaccctttcgggatcggcgcccgctgcgcccgcgaccaatacttcgagctcgagtgcaaccgcgcctactcccctccgcgcctcatcgtgtctacccaccggcaacatctggtcaacctgtccctcgccgacggggaggctactgccctcatcaacgccagacgccagtgctacaacagcacggagggtttgatcggtgatgccaataattatgtcaacaaggatatcactcttgtcggcagcaatgcctaccgcttctctgcggcgaggaaccgcttcgtcgcgctcggctgcccaaacatgggctacttcgtcgacacctacggctactacgtcagcggttgcacgtccatctgccggccatcgcaggggaatggtgcgagtggtgcctcgaccgggggatgcaccggcgagggatgctgccagagcaggataccgaccaataccgactactacgagctgtacgttcaaactttcaaaccaggggaaggggaccccatattacgtggcggtacgactgcttgccggtacgtgtttctggcggaggacaagtggatcgacaccacctaccgcggccacccggacttcgaccgaaacgacgacttcgcggtgcccgtcgtgctcaactgggccatccggaacgtcggtaactgcagcgccgctactcgtaacatgacggactacgcgtgccggagcgtcaacagccactgcatcgactccattgatggccccggataccgatgcaactgctcccagggctacgagggaaacccctaccttgacggtggatgccaaggtaaaaaaaataaccacacctcccattaaataaagggagaatttgaaccatgccacacaaattttgcaaaatttatgatataccaccctgacctacatgtcattgactcatgtgggtcctacatgtcattgagatacgagtggtatatcttaaattttgcaaatatagggtggcatggttccaacaaacccttaaataaaactagcatggtgacccgcagattgcgcggctagcatcattgtattttctctcatataatagcatatatgttttctcattatattattcaaatatattaaaatgacaacataattttaaattttgcaataactttataaacctactaatgtgtaatattcatattatattttatatacgtgttagttattaattatttttaatatcaaattttagttatttgtaaattatatatattcctatatggactctagactcgtcttttaatatttgtttttttaattccgaattttctgtaaattgtatttctatatagactctatgctcttcttcccatattatttatttttatttcagaatttttgttatttctaattgtatttctatgtggactctaaactcatctttcaatattctttaatttttaatttcgaatttcagttacttctaaattgtattcctatattgactttaaattcttcttctcatgtttttcttaatttcgaattttagttatttgtaaattatattttatacggactcaaaactctaattttaattttattatgtttattccaaattttagttagttttaaattcctatatggactctatactctacttctaatattccttactttttaattccgaatttctattttttttcttaattgtatttctatatggactctatactctacttctaatattccttatttttaattccaaatttctattattttctaattgtatttctatatggactctatactctacttctaatattccttatttttaattccgaatttcagttatttcctaattgtatttctatatggactctagtctcctcttctaatattccttattttttaattccgaatttcacctatttctaaattgtatttctatatggactctagtctcctcttctaatatttcttattttctaattccgaatttcagctatttctaaattgtatttgtatatatggactctgctttttctttttcttcgattaatgtgagaatttttaggccatgagagcgaacgtggaggctcatttttctattcctttaataatataactagcatggtggcccgcacagattgcgcggctagcatcattatattatctctcatataatagcatatatgttttctcattatattattcaaatatattaaaatgacaacataatttgaaattttgcaataactttacaaaactattaatgtgtaatatccatattgtattttatatacttgttagttattaattatttttaatatcaaattttagttatttgtaaattatatatatacctatatggactctagactcgtcttttaatatttccttttttttaattccgaattttccgtaaattgtatttctatatagactctatgctcttcttccaatattatttatttttatttcagaattttgttatttctaattgtatttctatgtggactctaaactcatctttcaatattctttaatttttaatttcgaatttcatttacttctaaattgtattcctatattgactttaaattcttcttctcatgtttttcttaatttcgaattttagttatttgtaaattgtatttttatacggactctaaactctacttttaattttattatgtttattccaaattttagttagttttaaaaatcctatttggactctacactctacttctaatattccttattttttaattccgaatttctattttttcttaattgtatttatatatggactctatactctacttctaatattccttatttttaattccaaatttcagttatttcctaattgtatttctatatggactctatactctacttctaatattacttatttttaattccgaatttcagttattttctaattgtatttctatatggactctatactctacttctaatattccttatttttaattccgaatttcagttatttcctaattgtatttttatatggactctagtctcctcttctaatattccttattttttaattctgaatttcaactatttctaaattgtattcctatatggactctagtcccctattctaatattccttattttttaattccgaatttcagctatttctaaattgtatttctatatggactctactttttctttttctctgattaatgtgagaatttctaggccatgagaacgaacgtggaggctcctttttctatttctttaataatataatagatagattatatttctcatgtgagtttaaaagctaattcctgttgatttgggtgatttgcgaagatatcaacgagtgcgagcggccagataagtacgcatgcttcggcgagtgcaccaacacgctaggatcgtactcgtgcatgtgcccgcgaggtgctcgtggtgacccgtccattccacaaggctgcctcgaaaaggacaagttcactttagctctgaaagtagttacaggtgaaaaattataactgtcgtccatcatggcaacaccaatgcacctttttttctctctctctctctcgctctaatgattcttcgatttctgatgagtgacatcttcaggggtcagtgttggtgtcttcctgccactgctcatgtacttttgcctatacctagttctccagaagaggaagctcatcagaacaaagcaaagattctttgagcaaaatgggggagtgatcctccagcagcagatgcactctggcggaggtgctggtggattcaagatattctccacggaagagcttgagaaggccaccaacaactttgctgatgaccgtgttctcggtcgcggtggtcacggtgttgtctataagggtgtcctggaggacaacatggtggtggccatcaagaagtcgaagatgatggaggaagcccagactaaggaattcgcgagagagatgttcatcctctcccagataaaccacaagaatatcatcaaattgctcggttgttgcctcgaagtcgaagtgcccatgctgatctatgagtttgtctcaaatggaacactctaccactacatacatggcaaggaacccatagctcacatatcacttgatacccgtcttcggatagtagcagagtcagccaaggcactcttctacatgcactcgtctgcttcaccgccaatcctccatggagatatcaagacagcaaacatcctacttgatgacaagctcaacgccaaagtttcagattttggggcatcaaaactagcaccagctgatgaggccgagattgcaacgttggtgcagggaacttgtgggtacctagatcctgaatacctaatgacttgccaactgaccgataagagtgacgtttacagttttggtgtcgtcgtgctagagcttctaaccaggaagaaggcattgtacttggatggaccagaggaagacaggagtctggtgtcatgcttcatcacagcagtgaaagctggtcgtcatcaagagcttctggacaaccaggtaaggaatgagatgaatgaagaaatgctcacagagattgcacacctcctgatgcgatgcctaagtatgaacggggaagaacgaccgacgatgaaggaggtagcggagaggctggagatgctgaggagataccagcaacatccttgggttgaagctgaaggtaatgccgaagagaatcagagtttgcttggcattgaacaacggaattcaaattaccaactcaagcaacatgatgttcttgatctagaagaaggaagtacatatacatttagcttgtagatcatgtttgtttgtgttaaccttttataatcaatcaataaattcaggtacaaattctttaaaattcttttatgtgtaacatgagaacacatctatggagtgcaatgaaagaaccgccaagaaatttatgtgggcagtaatttttttttaagggaagacggcaggagctctgccaatttcataaaaggaggagcagacaatagaggtcgttttacaagccagccacgcaagctgagggcaagcacatagcttgcgagattaaaaacagatgggaaaccccaatcttgagaaagtgaactgcaacaagaagaagaaagcgtagaaaactcatctaggaactaagggcttcatcaaactctttgcacaaagcaatgatgaaatcaacgacctgagctaccgagttgtaaatgtcattgaaaatccttccatttctttgcagccaaatgccccaggtagtgtagatgaaaaggccgtcaaaattacgtctttgttccttaactagctccttcctgcaagcctcccaccaatctagcaaacgtcccggaaaaagagagggtgaaggcatgtgtaggccgagcttgttccacatggagctccaaacttgtcttgcgaaggcacaatccatgagtaggtgattagccgtttctggttcaatgccacagaggggacagatctcactgttatcccagccccttagttgaagtttatcagcggtgaggttttttctgtgaatcatcagctagccaaagaatttgcatttattttccattttggccttccagacgaaagttgatctgttgtcctgtatacttcttagaaactggatcctgtaagccgagctagccgaatagcagccattcggggtccatctccatgatatggaatcctcaatgccatcctgcaaatgaatttgctgcagagagtgccaaagaatgatgaactccctgacttggactgtgcttttcattctctgcatctgacgaagccagcgattatcgccaagttcctgggcaaccgtcctgtttttcctggatgcgatctgaaataaggatgtggcaatatctttaggagctttaccttccagccatcggtcatgccagaatttgactttgtttccatttcctaaggagatgacggtggaggccctgaagagttgcttatctgtttcatcacagggaaggtttgagccctgccacggtttgtcctgagctgtccaatcataccataaccacctcagtctgagtgcacgaccaaagagttccaaattagtaatgccgagtccccctaaatcttttggtctgcaaaccctcttccagttgactagacagtggcctccattagcctgctcagaacctgtccataagaaagccctgcgaatcttgtccatctttttctctgcccatttcttgagggggaacaccgtgaggtgataggttggcaaagctgagagggtagacttgattagaaccgctctacctgttttgttgagaagttttcctttccaggtaggaaggcgagcagcaaatctatcaattaggggttgaacatcaagcctccgaagctttctgatgtgcagaggtaggccgaggtaggagcacgcgaattctttcaactgggctgggaagggggaaagaatatcctggaggtccagatcttcacatctgatggcgtaaacctcgctttttgttaggttagtgatcattcccgttgttcgtccaaagtgaaggaggatagcttgcactgcctgtatctcatccttgatcggcttggtgaaaatgacagcgtcatctgcatatagagccatgttaaagcgggcagttctcctatgaaggggctgcagcaagccttcatcctgtgcagccgcaagaaggttttgaagtgggtctatagctagaataaagagcatcggagataacgggtcaccctgccatagacccctgccatgcatgaaactgttaccagctcttccatttaggaggacattagaagaagaagaaccaagaatggagcagatccaacctagccatcttctaccgaaccccagcgtcctaagcctgtcaagaaggtaaggctagctgactgagtcgaaggctttggcaatgtctaatttgaggagaattgccggggtcttggaagaatggagctctttgaccaagttgttgacgaagaggaagttgtcctgtatgtttcttccttttatgaaagcgctttggttgtgggacacaagctgttgaagtttcggagctaatctgtttgcaaggagcttagaaaagagttttccaaatgcatggatgaggcttatgggtctgaattcactgacacgaagagcattctctttttttggaagcaaagcaatgtaggctgaattcaaaagccatagcctgcgtgatatcttcctgaatgatgtcccaacattttttaaaaaagcacctgtgaagccatctggacctggggagttgtctgaacgggattgaaaaattgcacttttgatttcttcaactgagaaaggtgcttctagatcagcgaggtcaaggttgtgttcctgtaagaaggagggattgatcacagaggttcgagacctatgttctcccaagtgctgcttgtaaaagttgaaaagttcttgtcctttttcttcatgagagtgaaccatcccggagtctgtcaggaggtgttgtatgaagtttttccttcttctcacgctagctttgatttggaagaaccgagtgtttgcgtcacctgctttgatccacaattgtctggatctttaacgaagtcgcaccctgtctagggctgccagacctaagagcttctgcttaagggatcttctgaaaaggatctcctgagctgagaggttcctctcttcctgtgctaagtctagtctgaagatcagctcagtagctatctccattctcaactttagactcctaactctgcatctgctccagtttcttagtgctttcactgttcgggctaacttgataagaattcttttcagggcatcaggcgagtggaccggttttgaccaggcagactgcacagtttcaaggaatcctgggagccttatccagtatttttcaaacctgaaaaggttgcatttaggcctagaagggtttgcagttagcagcagaggacaatgatctgagaccatcgtagagatagctgaaagcaagcaattttggaacctttcttcccactcatgtgagcaaaacaccctgtcaatttttgttaaggttggtatttctgtttcgctggatcaggtgtatcgacggccatttagttttatttcaataacttccaacatgtttaaagccgccctaaaagactgcatcatgcccctgttaagattgctgttatttttgtcggagtcctggacaatgaggttgaaatcatctaagatcatccacttttgatttactgtgttctttgtttgctttagttcctcaagaaattctcttttctcattgtctggttgtggtccatacacccctgttatgctccaagccaagacatcttctttttcttttaagtttgccgtgatcgagtaaacacctgtttgcacactttcaatcgagtattttgagtcagacaccgccagcaggatacctcctcttgtacctgtagccggcaggaaacagaaattatctgcaaacgatggacctagaacctgttgactattgcttgatcaaagaactctaatttagtttcctgaagacatacacaggagcagtttatgtccatgacaaggtttctgacaacctgctgacgggccgtggagtttaagcctctaacattccaactcaaaatggcacagtcatttgtagacatttaacgggaggggcacctgcagtatcccaagcggatggaagagcacaacctatagaaatggtgaggcttgaaacatagtagagaagcaaaacacagtcgcagggagagatgaggtagagcttggccggtagaggcaactgagcacttcattttctgcagagacataacctggatacataactgaaggaccatccttactagatcgaggtctaactgggtacagggggagcatgaggcacagcatagaagaacaaagccaactactcgagctacaagagctccaaaagaaactaaactgctctaaacccctcaggagaagcaaacaacccatttcagtactacaaagactcatgatagcaaaaaggaacagcacatcaacaagcggcgaagccaactaagtcttcttcttgctgtcaccaatggcgcagccggccaccagagcagagaaggcatctatgacctcctgagagagaggctgcttgaaaagcttgacgtatttggccattgcgtcctcagtcttcttgccgtcctcagggagcaggccagccttcttcatcagcagctcatgagcgaggtcaccttgcttggccggagaggaacgagcggctgccttcttggccaaccgagcactcttgcggcccgcctggctaagacgggtcgggatcttcttcaagagctttcccttggagacctggcgcgtgggagttttgagcagaggaggctgcaccgccgcgaaggcctgggtcaggaaatctgcaagcttgtctggggagatcatcagaggcgactgggaaggctgagattgggcagcctgagagacctacaccagcacggcggactgggacgcctggtcagctaccagctcctccagcatagggtcagcctccatcacgaactggttggcctgaagaggggtggcctgggtgatcgggtcctgtggggatgtagaaggggggcgagacagctggaagccgccatccttcatcactgcaggaaccgacagcgacggcgggggggatgaccttccacgcggagacctcgagcgagcggccctcaccggagaacaagctgccctgcggtgaccacccccgtaggacccacctctgttctccgaagacctggaagaggagcgcctggggaaagctgagctgcgagcaggagggacatcccaccccaaggggcggcggcgctccctcgctggcggagagcgggaacgtgagcgtgagcgatctctgcctgggcccgggctagggaaagccggaggctgagggggaagagtgccatccttgacgccaaggctccaaataaaatcatgatgctttgggatttcttctgtcatcgagacaggggagatgattccactggcctgactccctagactattcatccaagttggctcagttggcggcgggttgaagtcgagcacctgatcgagatgcacgagcaccgggtaggccagcagcttgggaggggaagtcctctgccgagcctctccgtccaggtcccagcgtgagtctggggagcgcggggacagcggttcttcaagctcgaagtgcacctccttcgggatggagtccggatcgtccgcccacagccaggcgcagaggcaagccgtctcgttctccgttcttggctcatcaaggtcctggatcaagcatccttcatcaagcagtcctgtaactgtctctgccgaccaagcgtggctggggatgccttcaaagcagacacgaatgctgaagcaccatttgaccagctctgcctggacgcgtctcgaccacgggagcaccgagaggtcaatgtcctccacagcaaaagggctcgccgcaaccatcatgtccctgagcgaccgagaggtgcaggtgaccaggtagcctcctttggagaagacgacaacattgaggtcctcacgaggaacctgaaacctggacgccagtaacctgttgatctgtctcatgttcgtcactgggagattgcctgtaacctgtaccaccgctgcggtgcgagaaaggaaactttcatcctcacggatggccgacgtcctgggcaggacgcgctggatgctgtccggcctgttggctgggtcccctgggcgcgacattgccgggagcggagggaaaactagccgactggctagcggaggagcaggagtggggcgaggaggctggaccccccctatcccgtcgtctgtctcccgggcaccagcgggctttgtggccagaactgccacagagaatgcacctcagggggtctctacaggaagcaactcggtggtcctgagctagatagcggaagcagtgacccaccgccttctttttaaagagctcgaggaagctgatccttgcttgaagaggcttggactgcgagaggaaaggttggtggcgaccagtgaatgcggagggaagctgaggaggagcagcggattgaaggtgcatgaatgccgaaggccgttgggcatgtctcttcctccaccaatgctttggcttcactgtctgccaaacttgaagacgggtggcagcctcagacggaagattttttgggattgctttgggaagctgcgagggcgaagccattcatcttgctgcctgaatgaagctatcctgaggagtaactccctgtaccttcaagccggagggcacaggaggagtaaatccttcacccaccctgcgcagtaaaaccggggctgcttgaaaacttaaagaacctgtagaggggggaacctgctggatcttggctggcaccagggggacgcgcatccgctgcctcactgaccagatttgccaggaggaattgagggcgaagcagatctggcagatccccatccgagtagctgccagagagggagccgaggctgactctctctagaaagggaggatagccgaggatgaaacctgtgctagcgggggaggacactagggccggactggtcggtggaggagggggtgggcgcctgggccagagtggcacccggcgatagggcgagaggaggaggaggagacgcgtcgaccattcggtcgtgaagttgccaggaagatgactgtccatgtgggcagtaatgaaaagcaggaaactgcataggctatagagaacaatgatatgcaactatgagtattgaatggttcatcaaatccaccaaacacagagcttaagttgtgcaactaacaaacaccttggataggcaaaagaaaaatcaaaagaattgttgttaatgctcacaatgccgacccattaccatcgtgtgccgtggtgacagatagagacagttataattttggtcctttttccactaacacgagaaatatggcctggatttcggccctaaaacaaaaactcatgccatgtttgcgccttttttcttggttttagtaccacctcggtaacggaaggcggaggagggcgcttcgctatgtatataagcaggtgggcttgttcaaaacaactctcggccttttggctaaaatcaagggtttgtttggtagagctaaaacttctaaatttaggtacaggagttgagtctggggtagagctgtttaaatccagctccacttttttagtttattttgtgagataactctgctcccatttttggtagagcttaaaattgtttagtttatttctagtttattttgtgatacagctcctctagttcattttgtgatacagctctactccactccctttttggtggagctgaaattgtttggctttatcttgtgagacagctccacctagctccgctcccatttttggtgaagctgaaattgtttggctgagattcagctttagaagaggtgggactagagttagagctgtgccatctgtggaccatatatccactgtgatattgaatttattttttataggggagggtccatcacagtgtattgctactgggggccctcacgtgtcgcctaggcgttgcactgatgccagggcctggcacacccccaaccaaaacagcttttaaaagtttgatgatttctcatgctgaacgctgatcctctacgtctgtttaagttgtttactgcaggaagagttgagttgagtactgatgttgagtgccattaatttgctacgaaattggtgatccatgaaactcaaaatttcggatagctttcgtcgtaaatttgctaaaaaattggtcactgacctgttgacccatgaacaaaaactctgcaagagtctgcccaaaatctagacatcgtcagagttcagacttcagatgtgtccaactcttataagggcgtttacaatatgcggacgtggcattcagcctccaccccaaaaaccgaatattccttgccacatcatccaaatgcacaacttccttagctcctagtagccaacattggctacccgttcttcgtctccggtgggacccacaggcgggctagaggagagaggggagatgggcaaggcagcagacagggatttggatcgtctgccttcgcagagtgaaggcacgagcatgcagtcagccccttatccaccattgaagtaatccaacggctcacgtcgcatgtgcgcttaaatagacgaatgaatttgtctgtgaaagaccacgatggttctatcgcaaaaaaaaaaatcccacgatggttgttttggtctgggaagtgtacgcgagctaaagaaacttacaaactatattagtgctaatacacatgaaaaaaaatggatgatatcaccaaattaaaaatacaagaaaactgaaagtttcaaataacaacactaattcattacaaagtagttctccatctttttcatattataagtcatttgactttttttctagtcaaaaatcgttaagtttgactaatttatataaaaaatagtaatatataaaatatcaaattaactttattaaatctaacgttgaatatatttttataatatatttgttttgtgttaaaaagtaaaaaaaaagaagtttgactagaaaaaaaagtcaagcgacttaggccttgtttagttggagaaaatttttgggtttggttgtcacatcggatatacggacacatatttgaaatactaaacgtagtctaataacaaaacaaattacagatttcgctaggaaactgcgagacaaatttattaagcctaattaatccgtcattagtaaacgtttactgtagcaccacattgttaaattatggtgtaattaggtttaaaagattcatctcacaatttacacgcacactgtgtaattagtttttttttccacatgaaaagtttttattttgggaactaatagagggagcatgacgcaatgtcaagtcacatcataaaaagcaaaagaaaaattatgattagagcataggattgataagaaaaattacaaaatttataatgcaaacatcattggtattcggactgaaatatagcagtagtgcttcgtggactttgacagacagatatccattcagacgtgcacaggcgacgtgagccattggattatttgaacggtggatgaggtgccgactgcacgctcgtgccttcaagccgtgaaggtagaggatccaaatccagcagacagggagagaggagcggcagcgccgcccggcatcgtcgtcgctgcttagcccgcctggcggcgcctccttgctgacgagccgcctagcccgccgtcgccgtgcacagccgacgagcccgccgtcgccgtccgcggccagatccggcgagcatggcggccggaggaggaggggacgcgcgacggccggaggagggaggcgtggcggctggaaaaggaggggaggaagtgcggcggccggaagacgaggacggcgacggggctccggtcggcagcgacctccgcgaggacgaccacgccgccgctcgtcgtccgcgaggaagacgccgtgaggaagacgccgacgccagatccggctggatctggccgtcccatcgccgctccgcccggcgccatcactggatacgccggcgctccgtccggcgctgggatcgccccgccgcctctccgtcaaccgcctgggccgccgcgtcgtccgccgccgccccccgtgtccgccgctccattcgccgccgcctgtgtccgccgctccatccgccgccgccgcctgggagagaaagaggggcgccggcggcggagtagaggaggggacgcgccggctgggttcggcagagagagaggagagaaaaagttaggagagataacgggtgggacccagtgtagggaaaaagtagaccacatgcattgtggagcttgttgcttatgaagtttctcagtctaggtggcagttttggctcctcaaaactacgttacgtgacgcattgtgactgccctaagtatcatcagatttcgctgttctagacttcagataacttcaattttaccgaaacatttaggccctgtttagattccagcttttttcttcaaacttctaacttttccgtcacatcgaactttcctacaaacacaaaccttcaactttttcgtcacatcgttccaatttcttcaaacttctaattttggcgtggaactaaacacagccttaggccctgtttagattataatttttttcttcaaacttacaacttttccgtcacatcgaactttcctacacacataaacttccaacttttccatcacatcgttccaatttcttcaaacttctaattttgacgtggaactaaacacagccttaggttcgatatgctccgcggtaacattactacactgaatactaggaaatcgcctcacaaaataggaaaaattacaatgatattcaaatttacatccagaaacccagaatacaaatcaaatccatatttgcatttaccattccctccatctccatgggactttattgttcttttcagaaagattaatactaatcaaatcaaatccatatttgccgttcaatgctagcctcgatgtgcctggctgaaagttcaactatggtcgacattccgtcttctgttggaactcacaacggcacgttcggatttaaatccccgccaaaaaaaaaaacctggcaatctggtactccctccgtttcaggttataagactttctagcattgcctatattcatatagatgttaatgaatctaggcacacgtatatgtctaagttcattaacatatatatgaatgcgaataatactataaagtcttatataatatgaaacggaggaagtagcatctattaccatggtctctactacggggatttatggggaaatattccaaatcttgcacggcagaagctattgtcatggtcattggtcgtgccatcatgtttgacttaacaccaccggtggtaccaaaaaacgcaaagaaccacttgtcatacttgcgacagcgatggcatgtgaacgaattccgccgaaaagaacctccaatctaaacattcagcgttcaaatagttttgaacgacaaattctcgacgtcttcaattcgtcctcgcgttcaatagtgggccgtgacgtatagagacaggccttctccactagtaacaggccaacagaaataaatacggcccatatttcggccccgcaaaaaaaatacggcccagatttcggcctcaaaaggaaaactccggcccatgtatgcgtttaaacgatagcacctgacgggatctggagatggatggatggttcttcggtttagtaccacctcggagacgaaggacgtacgagggcgttgcgctctgtatataagcaggcaggattagacgaagcaactcatacctttctcggccttttggctaagatcaagtgtagtatctgttcttatcagtttaatatctgatacgtgggccatgtgtccactttgatattaaatttattttttgtgggggagagcccaccacagtggcttgccactggggccctcacgcgtcgcccaggcgttgcactgctgcccgggcctggcgcaccccaaccaaaccaacacaatgtttgatcgaaatttttagtttttgtactttgttagtttcaatcgtgtagctggtgaatgcggtagagcattgaaaaatccatcagcaaggaaaacaattgtctctagatctgcaaacggatatctgagttcagatgcccctccaattctgaataatcgatataccttcatcagatatctttttatctatgatgggtgttgcctgcttgatgtccagcacgcacagtctttcaaagggaacggtgccgacatgatgcccaccaagtgctcgacgccggtaccaagctgtggcatcaccaagtctgatgccgagagcacacctaccacactggaacatgtgttcctggccaccatgaatccgtctacaccctcagccgcatcagcagcagcggtgccaccggtttccctcaccgcgaccaaggaggatgaggttgacatgggcaaggttgaggacaaatcagataagaccttgcatgatttgtgtgtagagataaaggagatgatcaatcaaatgcttgagacatgccgcaacagtaaagtggaaccaattgtgggcgatgattccaccggagtggcagtagtgccatgctctgttactaattcagttcccattgcattggaggccagtcaagaaattgttgccgatgagagtgatggcaacaacttggccagggaagaggattgtgtggagaagaccacagagggaccaggctttggagaacacttaactttttgtctgagcccaaaggttgatgttcccattcttgacttgattgctaatcagggcatgtcaagatttattcacaaggtggatttggaaccttggccaaatccagggccttgtcaaggtaacggaggcatggtggtgaagatctcacgatatgggccacctcatcctcgagctaattacaaagatgtttgtgctaagcagcaacttgaaccctgggctgatctatggttgaatcatggcaacgaaggtgtggtggtgaaactcttacagccctggccaccacctattcaagcagaagctaaagttgaggttggagtactactattattcggtgagtcccacaaaatctccttggactacagattcaccaagttcatgagtagaacgattattgtcagtgctggcttgttgcaaattctggttcctggatggtgtattggctatgcgctgcatctttctagcacattttggaattcctaccagcatatgcagcttttagcctatggttggtcatttgatgatcatgttttgttcctcccactaatgctagttttctggccaattcatgacacctggagtgaatgcttgcttggttatactaatgaagatcacgatgtccaaaaggttttgatctgtgacaagaatttgcggggagtgctaattcctacagagctcaaaattccatggccaccaccaaacttgactgttcaaaaatatggagtgttggctaaaatactgttaccaacaggattgatcaagttgaaggttttggataacatattgcgtgcacaacaatggtattgcagctccttgggagaatcactagaagatagcaccaatggtttcaccaagttgcagagtgttgaattggttcagtacaaggttgattttgctagtagctccttgcttgatattgtagtattgcaaggggatgattctctgccatttctacttcctggaagagcggttttagaatatcaagaatttgtgactcatgttaagatgacagaacaatcagtttcgaaaggtgaaacggatgtgccgaagctttgtgttctcaagttcagtttggacaaattttcaaattattcagttggagatacaatgattgctgtgttgcttacgcaaacttgtgtacaattagttccaagctacaatcagtctttatctgggagcaaaaatcactacaaactcttgatgacacaacatatgtcagtcattgcaaactatgaaatgatttggtggaagtcagagcttggtgggggcaagattagcttgtgtgcatcatggaatttctgggatctgtgtttttgttgcaagcaaatgtctacagaaattatggctgttggattatctggtgtgaaggtatggctgttgtttgctatatcagagctgtggttacaaagaaaacagctaaaacttgcattattagaggaacatatcaaggtgctctgcaattctactatgttattcttcctgcaagcgacaatacaagcatgactacaggactatcttcgttccatcttgcacaatgcccttacatatacttctgaccaagaaaaatatgatgcacagaacagaaaatatgatgcacatatgctccgtggtaacagttcactgaatactcggaaattccctgcaacatagaaaataaatacaatgatattcaaatttacatcctgaagcccagaatacaaatgaaggccatatttgcatttgccgttccctccatgggaccttattgttcattacagaagggttttacatgtgtaagaacaaaatataaatgcctactacacttgcacaaataaacaatctcagagcccttgtgtttccttttttttcctttgttttttccctgttgctctctgtttcccatcgcaacagacgaattcgtatttttatcttgattttataggtaagcacgttttggaacgggataaatcagaggcaggtgacccttctgctgcatgcataggaccgcctcattcaaactcttcctcagtggagtgaactccaaacccaaatccttgagcctctggttcgagaacttatacggcttcgccatcggcttcccatcatcctcacacctgaaaaaaaaatccaagaaacacacgcatgagaatttgagatcgatcgattgcatctcacaagagcaatgaagcaatgcacataagcaaatcaatggctaatatctgcatactttgcagtggcagggtaccgtgggaagagctccctgagcatccggaggagctcggcgcggtggagcacggtgccgatgcagaggtagcggccgcgtgcctcggggcgctcgtagacgaggacgtgtgcgcgggcgacgtcgcggacgtcgacgtaggccgcgacggcgttggggtaggacttcttggtgcccatgaggtagcgggcgacgtggttggtgctgaagttgagcgtctgctgaagcatgggacccatcgtcatcgacggcaccaccaccgccagctccagccccctcttcgccgcctcctccgtcgccgtcatctccgccatcatcttggcgcagcagtacaggttctgcatgtacgacgagaaaatttgccgagatgaatttattgttcatgtaagcaacgctgttggagttggtagaaccgtagaacggagcagagtaatgtgcttacgtctgtttgcttgcagaattcgtagtcgctccagcaggtctcgtcgaggacggcgtcggggctccggttggggttcatgtgcacggcgccgtacgacgacgtgaacaccacgcggcgcacgcccatgtccgccgctgcgttgatcacgttcctcgtcccctccactgcaaccggaacaaggtcctgcatcacggagcagcattagtaaaagttggaggaggttaaaggtgccattgtcgtctcttttgggctcaggaaccaggctagtgaacttacagggtcgttagacaccggggaggcgacatggaagacgccgtggcacccgctgaaggcggcgcggaggctggcggcgtcgaggacgtcggcgcggcagagggagagcctctcgtcggctccctccagctcaagcaggtgagcattcttgctgtcagctacagatacgcgcatgcaagaaccgatcaataaatcaagcacaacacgcaccaaatttatgcaaacaccgtgaactaatagtactagtacttaccaggatccctggctgttcccctgacgtggtagccacggatgaggagctccttcaccacccacgacccaatgaagccacctgctccggtcacacagaccagctgcttctcgccattgttgttgttgttggcctcaaaattggacgacatggtgagagacgctgaccagttactgtcactaaccaaatgctactctgaacttgtgagagaactttcgatcgagcttgtgttggctgctgctcgtatgtcactcgaactccgtatgttggtgtgagactagcgtgtctggacacggccgctatttatacctgcagaaaccgcgcgccgccatgcgacggaggaggaggacgacaagaggaagatagctagcgtaggttggtcagcaggtgaggggtgggggaggcgcagctgcgaccgcgcgaaacggagtgccgtcgccttgtcgactcactgttcgtccattcttcaggattcagtatttcagctgcgcgctcgcccgcaatactgggcatcacatcgcaaggccgaattcgccgatgggttggggcgtgcgcgtaggagcagtagagtatattccattgcctttctggacgaggggatcacgaagccaaccctggcacgtaaaccgtctcaggttttcgctcaacctggcgaatcttctctccaagtctacaacttgtacttttttaaaaaaaatatctgctgtcagaacgaccgacgattcgagtcagactggcacgattgactactgtccttttaaacctgacgttaatagtgctaccactaatactcctcctttttataatgtaagtcattttagtatttcccacatttatattgatgttaatgaatctagatagatatatatctagattcattaacatcaatataaatgtgggaaatgctagaatgatttatattgtgaaacggatgaagtactattttaatgtataacgtcgttgattttttatgcaacgtttgaccattcgtcttatttaaaaaaattatgtaattatcatttattttattgtgacttgattcatcatcaaatgttctttaagcatgacataaatgttttcatatttgcacaaaatttttgaataaaacgaatggtcaaacgttggccaaaaagtcaacggcgtcatacattaaaatacgataaaaactataggacggtataccgtctcaacggtatagtttataatttatacttaccaatcactcaccgattctttttctctctaaaagcgtgtcatgtactgtcctttcacatgacggctgctgactagtgacgactgacgagaggtctcttttctcctacattacaaaatagctatgaaatactctagtacagcactacttctacacctctttaggtccatatggatctgacacctgcttcaactagcaaagttagaattaagcactagagctagtagcatgagcctaaacaaagcatgtcagcagcacatgagcaagtttggctgtactttctggcctagctatgcatggtccatctttttatttgattgttgaataggagtatataacccataaatatcagaattagtggtatcacatctgaagtctcgtgacatcacaccctatatttggtatcagatccgctactaagatgtatcaacccggtatctaggtattggatccgatattcataggtattaaacctaacctaggtatcgaatccggtacttataggtatcagacccaatacctagatattagacttggtattcataggtatcatactcggtacctgggtatgcgacccagtacgtacaggtatcggaactgatactcataggtaccagatcagatacccgatacccgggtatctaatccgatactcataggtatcatacgcgataccggattcggtactcataggtatcaaacctgacctaggtatcgaatccggtactcataggtatcagacccgatacttaggtatcagacttggtattcataagtatcatactcggtacctgggtatccgacccgttacgcataggtattggaacaaatactcataggtatcagatcagatacccgatacccgggtatccaatctggtactcacaggtatcagacgcgatacctagttatcggatccggtatttataggtatcagacccgataactcggcattagatcttgtatttataggtttcatacttggtacctaggtatttgacccagtacctggatatcagatatcactggtggagaaaccgtctttggtcggttgcccgaaatccacaatagtctcggttccactaaaaaccgggactaaagatgatctttactcccggttggtggctacagcgggcatatttgatctttagtcccgattggtgttaccaaccgggactaaaaataatctttagtcccggttctaaatctgtcaggccttgtcaggccccccgagatctttagtcccaccaaccgggactaaagataggatctaccaaccgggactaaagatcccagggatctttaatcccggttgataacatcaaccgagaataaagcgtacgcacagcccacgcacaagcgcatgcgtagcccctctctctctctctatctcccatccttatctctttttcttctccttccttatctccatcctctccatccttctccttccatcctctccccttgctcttctctcaccccctctcctcctcccctccccctcttcctcttgcagaggcagccgacggcggcgggatggaggccgggcgcaggctggcggcggccggccggcggcggcgggatgggggacggccggccggcggtggcgggatggcggcggccggccggcggcgtcgggatggcggccgggcgcgggccagcgggatggaggacgcccggcggtggcccggcgcaggccggcgggatggaggccggtcgccggcggcctcgccctcccctcctccagatccggccggaggggaagcggcgggatggaggacggccggcggcggcccggcgcgggccggcgggatggaggccggtcgccggcggcctcgccctcccctcccccagatccggccggaggggaagcggcgagatgggtggccggccggtgagtcgattttttttttatttttttttaatttgttgtttggatgttttgatctgtgaatgaatctatgaatcgatattgtgaatgaatctgtgatgttgtgaatgagtatgtgactcgatgttgtcaatgaacctgtgaatcaatattgtgaatatatttgtgatgttgtgaatgaatatgtgaatggatattgtgaatgaatttgtggtgaatctgtgaatcgtgctgtggagttgtgatgtggatttggggtttgatttgatgatatacataccactcgattcgggagaaaataaaaaagaaaaaaggaccagctaatggactgccgctaccctctctttagtcccggttgatgacaccaaccgggactaaagatagtcccggttggtgtcatcaaccgggactaaagatcgatctttagtcccggttttttcacccgggactaaagatacccggattggtagtcccggttttacagggggttacgaaccgggactaaaaagcacttctccaccagtgtatgataatctagcatctatgtatcacatactagagtttctaagatgtagtataaccaagagcccaacatgacatatctaattagaatccattgtatccatatataatctaggtaattatttgtctggtctaatccgtgcatggtataggacacatgcaaatagatgcaaccaatcttagacacatagctaggctactaggctctgccataacaagtaccctacataactagggtacgggactactagtagctattacagggatttggtatgcacaacaagctagtagtacctccggttttatttactagctaggctagtatcaaaagcaggacttaagcatgctgagtactagctagctgtcaggaacaaaactatacactgatacacacagcaaatgtgcgtgatgataatcctagcagcacgcgacatactcgggagaagccggcacgtggggccgcggcatggaggataagtggtataccgttcaacggtataccgttgtgtagtctttctctaaaatacggatggagtatgttcgagggaatttgacgatatttaaaatttatcatggtttatctcggtgatacgagagaaaaacatcaaacaaccgatgctaccgcctacggtcttgcgaataaaaaggtaaaataccgatggtgcacaaaatacatataactacgtaaaaagagaaaactagcataaatctgcaacattttatgacataattaatctggaacgtaaaaaacaagagaccgtaaaatatatattttatattaagatgtttcgtttacttagagcacaaagcagaatccgctgtgctcaagtatcaaaactggagtacttagtggactaaaaaccaaccaaagaattccgtctgccgttgaaagttgaaactaaactacgatttgggcgcgtgttagctgcacgactcgcggctttcgaaaccgaacggcacggcacggtcggagataacagaaacccacctggttatctgttaccgtgttctgaaatctgaactactacccaatgtttgagactagctcggtgaggttcgcaacatcaacctttttgacggctatcggctcgtgtcggctggatgcttcggcttgcgtcacccggtgggcgcgccgccagccgatcgaacgggaaggtgaggtgcaattccaacttctcctccgcctcccgtgggctgggctacctgttccatcgccatatacacagtccccaccgacacatgtccatggctttgctagtggtataatttcactttgattctctaaactggttgtcggatccggttcgtatccctaaactataacatcggatattttgactcctcctcaattattaaaatcagaacaatttgactccctcgactgttttgaagagacggttttgctgacgtgatagtgttgacctggtttcgtcctacgtgatattgacgtgatgcttatgtgatattagaattaaaaaaatatgtgaaacccgtttatcattaataaaagaaatattatgggattcacatgtcatcctctctttatccttcccttcttcctcatgtctctctctttctctcccctttctctaccccttcgtccgtctatgggaagagctaaagcggtggcaacagaagtgcaagggattccagggcggcaatggtaccgcagtcaggcgtagggacgaaggcggtggactacgaggtggagcagcgggatggtggtcgcgtggtgaagaggaaggaggccggcctcacgagagggagccatggaggagtgccggtcgcaacatcaagtgttgggtgagtgctagtgtcgatcgcaataccaccaccgccgagatccggctcttgcccaccatcgtcctataatattccttctgtgaatgacaaatgagtcctacattttaaaaaaaattaacaccacgtcggacgaagaccaggtcaacaccgccacgtagttaccacgttagcgaaaccgtccttcaaaacaattgcaggagttaaattgtgtcggttttaatagttaggggttgagatatccggtattgtgatttagagataagaatcagattcggctattagttaagagagtcaaagtgattttattcctttgctagttgctgatactacttgcgggctgcggcacatagacagatcacttaacaccaaccaggcaggccagtctccaagagtccaagcccatagccttaggccgaggccaggatgattctaatgggccttgtgccacacatgggcttcacagggcccgaattcacacattgccttcttcttcctcttcttttaataatcgtattaattcacatacgtgctcagtcaaccggaacggggtcatttaacttaactgatgtgaattgagccattaacatgtggaccgtagtaaagtgagctcactggacagtaactcaactgcatgtgtagttatgggtgatctgtttcccagtcaacccatatgctcccccatgcactggcacataccccgtccagagattaatctgggcaaatgcttgttaagattcatgatcagatgttgaggttaagtccagaaatagtagaatactcatgcatgatccccacaaagaaaggagggagggagaagaacatgcatgtggtactagtcaactgtagatatatctgtaacggcatgaagctgcacatgagaagcagttatagttcgcactatttagagacctatagcttcggtggacatgccaacggcaacggtagaatcgggcactatcgatcggacagacgactctaactaatcctgtaccgtaatgagtgctactgaagattttagaatcatccactccaggcgagacatgcttgcagtttcagacatccaagcagagacaccatatgctcagctcaatgcggcgagcgttccaggtgatgatcatgatctacaaacaggcctcgcagcgacaatcatacagacccaggatgtgaacagaagataaaacagctcaaaagcaagcaggcttttctccttcaggccgggctaatcaatgcaatgcagcagcacggcgtctgcacacgcaatgcacaactctcgcgcagtcgcagaacgatctgaaatctgaatagagagcagaaacaacaacggagatcgatcgatcaatcgatcaccgatcaggtgaaggcgtgcataatttcagagattttgcaggagcaatccatctccaatatgttcggtcattcaccgacgctttcagaggaagcgagtgatcgatgagctgctgctgctgctcaactgcaggggaagctggcagacagggcagatggggaagtctcccaaccgcgagaactttatgtcgcccatgcttgttggcagctgatctctctgatgagcttgctctcacacccatccatcagctgcgccgtctcacatcatgcacatgaaccacccgacaccagcaaagatcacggcaagtgagagcattcaaggctcggtagctgcagcagccagcagcagctggtagtagtagcttggtccaaaccgatcagcccagtgagtgatgggttgccatgcctacctccctcccattcatgtgccatggccatggagttctgaatgctgctcagtgccgtttcttccgctgcagcttgcaccaaagctaacagaattcagatcgaagctgatagtacgtgctagtttgctaccaagttaacagcaatccaacagcacacacaacggggagggaaaaggggatattacactttggtcaaaagccatcttgcaggagcagcagcagccaaacatctttggccaaaaggaaacgggagtatgatgatggatgagaccttgagggcatcgaaagaatgaaagatcctctttgctaggcatcgccccagcacgcttaagttcgttcccttccccatgcaggcatgctctcgcgcgtttttttgagcaaccacatctccgtttctaccaaaagccatggagattgagatgagaacaatagggcattgcagatgctcttttgccaacatttccagtacaaggatggaagaactgcttctgaaaatgcaacgatcagagataaggaatttacacaggcttataccagtaaagagtaaaatgggagagatcgtgcaggtttctttaatctatgagtaaaacgcagaaatcgcaatgaatagcctggcccgagagaagaaatgcaagtactggtcacctgaacaatctgacataagctattatgaacagtaataaaccaatctgacagaacaacaatatgaacaattaactcctgatccggactagcacaacgcaagatgcaccccaggagaacaagatcatacaagctgcaatgctgcgttacaaacttttcatacgagacactatgcgaagctgcaaacaaaccactgtaaggcaatcttcatgcaaaatcagaactcaattaatacaccatgctcgcacttgagaatttcgacacaacttgaaccaaatctgccgaattgtctgaggcacgtccatatcagaaatcacgcctatagccaatacctaccccagatcatacatacataaatgcttcagactggcttcccgtgaacaaccacagggaaacactgtacttgtacgcaagacctattaagtaatgacaattactccactgatcacaaagatcacctttcaatacactgaatcactgattcacaaagatcaacttgaatagcaacaagatacgcaacaaaggaatccatccatccatctgcaccttgatagtatttgctttggtcaactgaccaacaatgaacatactgaaacctttgtgatgccattgttaaaaagaattaacaaatagaagtaacaccttaagacatcgttaatgaactcatccaataggctaatataatatccattatgtccagaaagactatgtacatctaagcacaccaagaactctagtcgcatatcatgaaggccaaaaccaaaactctaaacaaaagagagagagagaaaaagaatattataggtaaatactagagacaataacgaatccaactgacatattaacgcatattgacggactagacagagaaaattgccaaactcttttttagttttttaacccatcggcggcgaggttaagatactggcatgctgctcaggaaactgttggtttcaccgccaccggcttggctgggtcagtgccgagcacggtggccgccgccggcacgccgctgacagccgaagcatactgggggaggacgctggtgtagtagatggcgtggccattgctgtcatacgccacctgcggcgcgtaggcctgagcattcgacgcggcggcgggggaagggccattgccgctcgcattggcattgccattgtgctgcgcgacggcgtagacggcggggaaggaggtggcgccggggccagcggcggtggtgaagtagccatgcggcggcgcggggatgaagaagacgggggcatggtcagcgccagagccaggggcaacagatgtataccttcccggcaccggtaggaaggccgtcggcggtggagcggatgatggaggcggagcagcgggcttctcctggtacttgggcaagtagtactccggcgtggccgttggcggcgttggggtgacggtggcgggagggtaggcgcgggtgagggagtcgtcgctgccatttctcggtagggccgccggcggcggcgcggcggtagcgggagcaggtggtggtggtggttgctgcgcggcggtgtcggcgaactgtagcttctcgagcccctggatctggcgctggaactcgccgggagagacgaccggggagacaacgacgtggtcgcttacggggttggtggtgtggcggtcgtcgttcttggcggggatctcgacggggacgttgtccttcaccgtcggcgggtcaccggcggggtccttcaccttcaccgcgggcggcgggacgaagccgttgtcgaggccgaacaggtagtcggggcccgtcggcgctggcaacaccggcggcggctgcggcatcggcacaaccgctggtggtggcgactgcacggagaccgactcctgcttcggctgcggtggcgacggtggcggcggctgatggacggagttgagcgcgtcgacgaaccactggcgttgctcctgcttgggctcgaggaggccggacggctgcggcgggggcggtggcgtgggcgactggacggggaagaggaaaaccctgagcctgggcgtggaaccgccgcgggacgagccgccgccagatcccggcgcggggcggagcaggtggaggcggtcgtactcgaggacgaggtgctccagatcctcgtcgttggtgacggagacgagcgcgtcgaggtcctcgccggggagctggtacttgacgcagaagtcccccggagaacccgcgaggccggccaaccgcgcggcgaagtcggcgaagcggaggggcctctcgagcgacaggatcttcgtctcgccgttgacgtacgagagctggtggtcgtgcggccgcggctggatgcgccccccgtagctcaccatcaaccgcaccttcgccggcggcgccggtggcgggggcgccgcctgcgccgccgccgcctccgagccctcgtggtgcgcgtcgtcggtggccgcggcggagtgcggggacgagtcgccggagtcggccatggcggcggcggcggcgcgcgttagggttggggatgatatgatgggggagagcggggtgaggggagagggaggctgttataaggtaggtaggggtgggatgaacgggttttggtgcgattaagggtggtgattagcgatcttaattctgtgtttagtctctaaagaggggaggggattattgactgcggattttggcgggggtttggcatcgggagatgtgtggggacagttgggattgaggtgtctactgtggatatgtgtgcctgctgtggcgggcccggctttttccatttctttcttttttattatcctgcttcttttcgcgtgatctttttctcacctggagatacatgcacgataggatactttgcaaattctaatagtttggttttagtattactgattggattagcatccagcaatgttgaatcagaaatgtgacgccgttggacagatcgaaatgcacctggcgaattttttcgaattggaaaaaacggcagcatttaaattttctgttcgccgatgcctggtctattgtggaggggctttttttagctgctgtgcggagcgtcagggcgtgccgtgatggcgacaagcggacggaccgatcgaaggaagcattgggtgcgtctggttgcgctttacgacggcccaaactgcctcgccgtcgccggtgtcgccggtgccagcccgcacctgagaattcaccccattttacaagtttggaagaaggaaagcgggcgcaagtttcgatgcgtgggcgcgcacccacagtttccacttccaaccgacagggtgcactcgggcgcccgggtgtgtgcatgcgtcgcacgatcgcccaaggccccaaaggccaagaggggtggtgtgctggggccgacgtacgtccatgtgtcgcgggggtgctgccgctgacgacgcgcagtcgcaggcgcagggccatgtggatgtgtgggcgccgtcggagttaattttggcagcgtgttaggcagagaggccgcggcagccaccacaaaaccggtcgcttctcctggtcaaaacctccgcatctcaccgcagccgcacccacgggcgccaccacaccgctgcacctgcactgcccatgcgccccgcttcgcatacagaaacaactcgttccactgaaattctgacgcatggatcaataattttagtagaagtactgccctttcctggtgaaccggatttgtttccccaaaattatcctgccatgacaaatttgttcgacatcgatggtcacatttccacaggtactacttatggtgatgaatatgtgtacgttgtatttgaggttagatatttgccaggtagtatacgtgataggaggaagaaaaaaaaaacaaaatgataccaggagtacttatttgcactactattaaaatgaggatctgacattacggatacagccaaaccagccgtcaaacgagtgaccgcggaagatggcgagcacccgatgatccagctattgacctggccctcttttcggcgcgtcacagtttaacttagcatccctaaaaactgccacgatcacggatctagccagctgcttaatgacctgggagagtgattacactgagcagtgggtcccatcaccaatagaggtccgtgggcccacgtctattttttctgtgcagatttccttcattctctttttcagcacacacgaaatcgattttatctatcacaatatcttttcttaccaaactcagcgcgtgtgatcttcttttctggctgctttgtttgaagagaagtgcacgattacagtgacgtcgttagtatcgatcccagatgaaagccggatactatattatcgccattagattagactatttgtttcacaacgcatgtggcaagccagttggtagttagcaggcatgttagccggatggattctggcaggaagttgtgtggatggagtatattagtagcactccttgcacaaaagatatactattagtagcaccaaattaacaatgctggttaatccatccgggcaatgtaataatgtacacctttgtgtttccaaccaactaatgcatgtgtgatcgagtagcagggcctgtgtttttttaagcatgcaaagaaggttaaagaaatcattagaaacctgacaatcaaggtgtctaatgggcaaccaagcaaagcaagcgagtgaatcctgcatcaccgttgcatagctggaaaggataactgatgatcctacatttttaataactgatagaaagtggcgtgccgtgggtgacggcggccatgattagctgtgcataattaccactttacaagattgctaatcagcgaaatcatgctgtttttttccttaaataaaactgcagaaaatttacgtgcgtacgtgcactttaaagcccaatcagttttttttttcggatttactcggctacagtttctgtccatgagaccaggggagaggcattgaccgagcgtcatctccttaatgggcccacgtggcagtcacagcgaaatatgggcccaccaggccggggagtggggagggtgacgcggcatgcatttgagctggtggcgtacgagcggcgcggcccacccaacacgttgctgcatcatctctccacacatatgcgttcacaggtgtagtaaagttgactcggtaaaattgactaagtaattcttactgtaacttttttttagaaaaaaaagataaatttaataactgttggttacttcgtgttagtgtagtattttcacgattgataatgatataagccgacaatattattaaggatttaagggcgtgtgaaaagaatagtggacggaatggccgaataggttctccgccaaagaggagatgctgctgatcgcaaagaagaggagtacacgtacgctttgcctcaatgagatttagagagcgatgtgcatataatgtgggtctcgattagggatggcaaccggggacccataacccacaacccgatgggtttttactctattaggagacaaatatgttccaaatattacacccatggatctcttatcgggctaaaacgtcacccatcggttgggccgggtcctggaacgttctccatccacccgaacccattaacccgtgggttaaaaatacccataggcctcagcccagaaaatacaagtagcccaatgcccaacaacaaatctaagcatctaagtctaagtgtctaaccctagaaataaaaacccatttcctctctctctcactgattcacttctcctccctccccggtactgtgctgctgtagggtggccgccgccacaaaccctacggcgcctctcgcccgcgccggcgcacgcccacgccgcccgcgccacccgcgctgtcgcacgcctgcgccgtacggccgcacgcccccaccgcgctagccgccgccgcacgccagcgccgcgctcgccgcacgcccgcacgccacccgcccaccaccgcgctcgctgccgtacgcccccaccacgcgccgcacacaatacaggcctgcgcagctgtgtgttctgcacgcagcatggcagcggtctccggctccggcaacgacgacggcaagtgatcttcttccctctttattaactgttgcagctatatctaatgggtatgggtacccgtcacccgtgcgggtgtgggtatgggtgaatttttcacctgtgagcgggtgtgggtattggagcgggcatatttcattttaatgggtgtgggtatggtgtcggtgaatccaatgggtacgcaccgttgccatcgctagtctcaaatctgtaaagaagattagagtaggaattaacgcgtatatgtatagtatcagcgttccaattagacagcaactctttttttttttttggcttcaaattctactaaacgcaacctatgtaggagtagcacatgcacctccagcttactttggttgcacacacatgcgaatcgccttcccgaagttaagttgagtgtgttattcaaaccagctgcaattatggtcagtctacgcagtctctagtctcacaggtcctctttctttaatatgaaacggatagaactgaattagagcaggtataatagcaggctgtaagccagctgcaaacatattttaaggagataatgagaaaatagaaggataatgggctacagatttgtagccagctgtagcacggactttaagacgtagtgtgcgtatgacaggtgggaccatttattaatagtatagtatgtaagtattgtatgaataaactattagattggctatagataaattgaagttagtagtgggctatactattgaacttgctcttagggtgtacgtgatttagaagcaaacatctcgtcagactttcttgcctgcacacgatttagggattgtttagtttaagtcaaaattgaaagtttaattgaaattggaacgatgtgatgaaaaagttggaagtttatgtgtataaaaaagttctgatgtgatgtaaaagttagaagtttaaagaaaaaattaagaactaaaccaggcctcattccttctctctgtttgttttgttctggggctatgaagaaacagaagaaagtttcttgcggcgccacctcaacgaatatccttgttcgcccaaggcctggagttggactgaacaattctctggataacctcaacaagaccgattcgtttgtcatcatactacagtatcattaggatcagggttttcaatatctgaagatagcccttgacatgttcagctgattgcctgaaactgacaggtaattggtacttctagatgattttatttcagcttttgagccgggatatctacctggagaagattaccttaattaatttcttcaagtccgctaatgatatagtaggagtactatactagtatactggtactagatgatcaaaatggcaaccacctaaccgttaaaacataggagtagtaggaggagtagctacgtagcctgaaacctcggaagtgtagatggagacctcgcagctacacactactgaacaaacgaacggtccaaagccttttcacagagagcaacctccaaaccgggacaagcatctgctgccgtccatgcggcgccaagcaaagcccatcaccgtcgtgttggcaccatcccagccgtctgtccctctcagtctcacccatcatcatcatcatctcgcaagcgtcgtggacgcgaaagtgaagcttcatttgccgatgtactagcaaacttcagcctcagctacatcgtgggtacgctgcatctcctgctccatcggtcccaaaaacaagtatagttttacgcggttcatatctaacgtttaatcattcatcttattttaaaaatatttataattaatatttttatttttattaattgataaaatataaataatattttatgtgtgactatttttaaaattttttataaatttttaaataaaatggacgatcaaacgttaaatacggatactcatggctacatttattttacgacggaggttgtaccaattaacatgatctaaattgttcccatcaatcactatcacggccttaattaaaagagcaagttaattaaaccctctatttatggggctaccaaaaatatgatgatgggagcagatgcagagtactcggttaacttagctccgattgttaagctttaatcttcacatgcgtgcaagtaccagattgagctgttttgtgacttgtttagggtcgagagcctcgagtcccgagacacgtaggcaattaggcatgatgggtttaaccaagatacacatgggttagtgcaaatcaggattaaccaagtactctcacctgactagataaacatggaagctagtactacaagtcaccagccagagttaacaaacactgctctgggtcttgcgatccatgtgagctgaagtgtttgaagttccttccaaacgcattaacaaattctgccctgctttatcactgttataaccactcggcaatgtactgtaggagcagtagttagtggtacaggactatcggtaaactcgaattaggagtcgtggttgattgcattgacgagcgtaacacgagctggtgcagttggttggtacatctgcactcttcacccgtgtctgaatttctgctcgtctgctgtgctgtcgtcgtgctgcacagtctacaggaatagctagtggaccagtggagtaggaggatttacattttacaatctcgatatattgcctaggagaattgcgtgatgcatccacgaatagtactagttgctcgagatcgaggagggagacaaggattgtgtgctattttactggacttcgtgtatcctgtttctttcaccctttgctgctactgcctactagtactagtagtagtactagtttgcttgtgccttgcaagttgcaacatgttgtacgtatgcagttactcgctcagtcccaacaaaaaaaaaaaaaaaaaaaaaaaaacataggtttctgtgccaactatccgtcttatataaaatttttttataattagtattttcattgttgttagatgataaaatatgattaatactttatacgtgacttatcttttttaatttttttcatagttttttcaaataagacggacggtaaacgttggacacggatttccactgctgcacttattttgggatggaggtaggggctgtttggtttaatgcttcaacttgccacaccacactttagactgccacacctccttagccttgtgtttggttcattaccttaattatgccaagccacactttcttaccatcttacccacatgtcatagactcaatcttttgcctaactttaccacaaatgtggcttacaatttgtaggccacaaaaagtgtggcaagccacacttacctaacattgtctaaagtgagttatgacaatgttagttaagaaccaaacatgctggtagtacttcaagaatttatctggcaggcaacatatgctactggacgctgatatttggcaccggattcagcccatctaattttgagcccaaccagatcttatcatatctgtcaaagtttattcggcccaactatatatcattacgaggcccaccagtggcagtgctcccctccctattggaccggagtacaacaaagcccaattgaagagacggcccaatgaatgggctgcagaacaaggcccacgccgcaattgctccgtggaacatagggaaggaaagcctcgcaagcagcaggcgaagaatcgaattgcggcctgcggcaatttgtcatcaaaactcaaagacatatttcagctacttgtcaatttgtcatcgcatacaaagcatcgtcttcttgtcatcagcaacttgtttgcgtacgattatgagctatgctttggcctacttccatcagcaagtgtgcaatacgttgagctagcatccagtggtcactggttagttagcagtagttgtgtactgccagtatagtagtagctaacaggaaggcacattcagtgtgtcagtcgacgagtccatactaagtcataacctggttgtccgttagctgcaggccggacccgatgcgtggaccaaaagagtatcggaattcagacacgccacatgattttattgatcggtacacgctgcaagtatggctgggctggtccaagcccaaaattattaagagcaatgacccggtttcagttgcaggcagcaaatggaagagaatacttgtagtatccaggaaaatcttcctctcaaaaactttgaaatatattagggcattgtttagttccaaactttttctttaaactttcaactttttcatcacatcaaaactttactatacacataaacttccaacttttccatcacatcgttccaatttcaaccaaacttccaattttagcgtgaactcaacacaccctagtatttgctgcagaactgtagagaaggattattagagcatgtaactgatgatgagaatgctgaattattgatgcaccaactcttcatccgggactgattcaaagggatttagtcgatttttctccctcgattaaatggaagacactggtcttctactctgttatcatctgttcaggaaacaggactggagtagccacatttaccatctgtaattataaatttataatatgctcatttgacagaaatgacatatatatcatccaatgcaatggaacatgagcagagagtagtaatctagagtaaatgcccatctgtttgtacattatcttaccaaggatttttatcaaatcctacctgaacgaaagcaaagccgaaaagaaaaaccatactaaaatagaagagagatcagggaacaatacacctaaactgcaagctgagagaagcagcactgaagaacaggacacgacatggatctatctatcatcatctattggaatctggattcgggccactcggaacctcatgcttgctgtcgtcgatgccggccgagttccacctccgtggccggaacctcctcgtcctcgccgccggcagcagaaggcgccgtccaccggccgggaccgacgtcgccgccgctggcaacgacgacgacctcacctttgcttcttcttcttcttcccccggaggaggagccagcgacacgacgagcataacggcgcagagaaacgcacagaggccgagaagcggcagcgcagcagctggtcttcttccatctccaatccatcgagctcttgccatgcaagaatcagcttgcagtaaagccttcgatctccccgatctcacaagccaccactaaccaaaactcccatgggcatctgccagaagacgagacgagagcttagctgaaatatcgctctctctagctagctgcctctcactctcactctctcagcgtgtgtgagctcagctagctcttgtaccgtggagacaatgcaagcaggcagctgttctattctttccaggattcacacatgggttggctacttggcttctctggagtctggaccaaaagtttgggtttcttgctttgcttgcttgcttgcaggtgaaatgggagatgaccatgtgtatgcaaaggcacggagcaggggtggctgcttcttatctactgcccgtgaagagaagcagctgagagagctttgtgtgatccatcgtgtatctgacagcatcatcaccatacatcgatggctttgtagacgcctcagcaagacatgcccctagattgtactgctactgtagctatatccattgcatgcatacgcatgctaattacttgcagtatggagtacgtagtactatgactgtatgagcgtgaatcaacatctgcattgtactacgtactgcagatgtatgattgcactcgctaggtgtgtgagaaatttacaattgcttcgagtatttacttttgtcggtcgcgagctcgcaggaaaaagttgatcatggaggacggagcagcaaaaggacgcaaaggacgcgatggaaaagacgtaagacggcatcaactgagagctttgctcatcttggtaaggctgtaaagctccaatccaacaaaatatttgacgctcattgacagtgttgctgatctttcattaactaatccatctcccttttaattctcatcttatttgtatatctgtcaagaacaaaatgatgggggtgctacgatgttagctctgccattcaacgtttccacaggctaagctagcaagcatgataaaaaggagaagattgtgaaagcctgaaaggagtagtagcatgcatgcatgcagtgcagccaggccaagccaaacaagaatgcttttccatggactgacgacaaacacaagctgcatctacacaaattcatgtccaaccctgtagcagacaggcaatgttctgcagttgtctcgtcacctcctctgtagggactcgctacagtcaccacacggaccttgcacatgaactcaggcaaatatatcatcacatgaactgtaaaagattgatctactagatggacaaacacaaacacttcactgttcgccatgtagatgctgccggatcgatcgagaatttgatttgccgtttttctcttcgagaggggacgagtggggcgcgcatgctggatgaaaaggttacacgaacttcaaagcgggcatggttaattatcatgggctctagagagggcaagagctgactgaaactggactaatctccacctatcgtctaatcacaactcattctgtcgccggccatgaatgcctcgtgattcgggatatatgcaaacggaggaagcatgcactgcacatcctgtatgctactggagtactattatcagcaggttacttttgtgcatctgaacgtggcaaaccgggcttcacgggagcaggcatcatcaagagccaaaacctcccactataattcttcttttcgactctattcttcaggcttttgtattaagcctgcagcaccctctcaatacttcaattacaataggatcggtgaccacagcttactaggttaggggacacaaatatataacttgtcccaagttaacatttgcattgtgcatctgcttttgtagcagtagtagtagccgtgctaatgcaattattgtggatggaacaattcatgtaacaatctcatgatttggatacccacggcggcaagcatgccggccgatcatcctagctactcgtaagtatcatttcagttgcatacagtacaatactccctccgacccaaaataagtgtagccatggttttctgcgtccaactttgaccattcgtcttatttgatttttttttttaaaaaaattaaaaacataagtaatgagtaaagtactattcatgttttatcatcttataacaacaaaaatgctaattataaaaaaatttcaaataagacggataatcaaagttggacgcggaaactcatggctgcacttattttgagacggagatagtagtattgtctgttcagttaggcttcgggaagtgtactaaaatattacaccaaaggttatcaaaagctggccttaaatacataataacttagcagcgcgttactactagagtactccagtatttaggaccctttaaatcacaggaataaaaaaaaatgaagaaataggaaaaacataagattttgacaagaatatagatgtaaaactgtagcgcccgttccgtcgtggcgcctagcgggaaaactatctcttaaaaaccctatttgcgaaatccgtttctttgcttgttgtctagtgtccgtgccatctcagatctcaaatccccgatctattgccgagttcaatcccgaatccaaatccttcccaattcaaatccctccgcaaaagtctatttcgcctccctcgggttcgatgggccgaatccctctcggcccatctccccctccctccctggctctctctctctctctccccgctctgccgtaagccgcgccgagccctccctcccgctctcacagccgcttcccgccgatgccgcccaaatcgccgcaccgcccgcgcgcgcgcgcgccgtggtggccgaccggccagtcgccgccgccgtcagcgcctgccgcgcctgccctgcgtctgccgcccgtgtcgccgctccactccaaaccgccccgccgtcatcgccgtcgtcatcgactcggccccgcctctccccgcgcgtccctccaagggacggaggctgagctccccccctctgccgcgtcgccctctctccctcccccttttccccaaagcggcaaggaggcaagccccctttctctcccccttttttttttctcttttccctcccgccggcgtcatctttccccccctcctgtcgccgttttggccgcgagcgccgagcgccagctcgctcccttgaccgcccaaggtcggtttccaaaccgacatcgccgccctataaacccaggcttcccccctttcctttcctctcccattcgcctccactccattgtcgccgcctcccgtgctctgttcgctgtcgccgttcgccgtcgcgcgtgtcggaggagccggcacgagcgaggacatggaagaggactccgggcgctcgccttcttcctcttccccggcccgaggccggagagatcactcctgtgccgtcggcctctcgtcacagcgccccgcctcatctcggtagtgcattcccccgttctccctcctcgatccatctcctccccttagttttcggtagtagcatgtgtagccttcccgtagctagctggcgccgccccgaccgttgccgccgctcgctgtgtgctcgccgccgtcgtcgcccgtgctccgtagcgcccgctcgtcgccggcctcgctcggcgtagctccgcccaatccgacgctagcaacggattcccgtagccgcgtagatgctctcaccgccgggaatcggcccctcatgacctcgtcgccgtttcccccttccctcgccgccggttgccgccgccgcaatccgcccccgtcgagctccctccggcgaatccgagccgttggctcatctcccctcgtcccatgcaaccccccggtgtgctcgctttcgcatgtatcgccgtggttcgctccaccaatcgccaccgccgtccgttgtccgttccggccggcgtcgtcgtctacctcccgccggcccgcgtggtagccacgtaggcgccacgtcggcgccacctcggccgcgaccgggtcaagcagaccccggtccgccgcttccctccgcccctcgcgcgcgcggtccaccgcgagccgtgaggctgcgcataggcccgccgcaccgcgtcctccgcgaaccgcgcgcatgcgccgcgcctccctccccaaaccctagcacgccccgcgtgcacctcgctcacggtgagctgagtcgccgacaagcgggtcccacccgggaccacgcgggttggacccggcccaccggctctctctctcccctccccgcccgcgcgcgcgcgttgggccgccttcttgggccggccggcccattaagctcggccgagccgccccattctctcgggccgcgccctagccgccagagggaagtctaatttcccgccctagccgccgtaagtccgtttgactccgtccaacttccaaagttcctcaaatctcgagatctatctaatggcacgcttagaggtcaataatagggctttattttcgccgtttgctgagttgtcccgtttcgcgtgtagtttcggagcccgaagacccgcagtgcgaggatttcgaggatcaagctcaagatctcgagcgaggcaagccacctttaaacatcttgagcctatatttgaacttaattatgttgcttgaaaaatattatgcattgataggatcgcacttaatctgcttgtcccgtctgcaaggcagattggcggacctacctaatttgttgcatttgacccttccattgtaattgttataccatgttcccttgtacccacctagttgcgcctcggtaatcgtgtactctgcacgggtatcgacggtcgccttcaaacttaaaatctgagaaacatcttgggtaaaacttgggttttacaaaagacttggaaaacccgacacctgggtcggtgtttgcgaactaaatgaatttccaaaaccgcggaccggggaacgtaccgggtgtacggtttcccgctcttgcacttaaggaccgtttccttggaatttcatccgaacataagacaagtacgaccacatgggtggaatgggacacccctggctgagtaactagcttatcgggggagccatgatgctaagagacatgtggattcgccggggtggtgtcggggaggacccctgggcttcctggcacagtatggtctgggacctaatctggtgttggtttgggacccctctcgttggcatatggtgaacctgtgtcggctttcgaaatgccttgtcatgaaagccttaaggtctctagtcgtggccgttctgcacgggctggatgatccgggttagtaatgtcgtgtgggtaaagtgtaccccctctgcagaggttattaaaactgttcgaacagccgtgcccacggtcatgggcggatgtgaggtgattcttagcgtagttttgtttgactactgccttgtgaaatttgctgttgtggaatgggtttgatgtttggaaaatctgcggctgatgggatcagccaggcccaggtggccgtttgaaagctgttggccgggtgccaatcttgatcaattcaaaagactgaaacattgcacatactccgaccggatgagacgcactgtctcatccgtgtcgtttgagaagcactcccttagttgtttcagaaaagagtttaaataaaatcaatcgcaaaaacaacagcctttctttgaagcctacattaaacacttatttcccatggcttgctgagtactcctgtactcacccttgctctatataaataatcccccccagttgctgaagaagatgaagcggatcccgctgacgaggagttcttccaggagcaagccggctatgatgagttttagggtttcggcctagttcccaagtcgcgcctgtgatgtttggtccaagtcttggcttccgcttcccttttgtaatgcagttgtgagctcgagatctgtccgcagcccaacatgactgtactcctactctataataaagagacctctgttgctgtgatattctgtcttcctgtgataccagcactgtttcctgggactggtatcgattaacgggttaatttggagcatcacgggctagttccggtcgggactagttcggggcgtgacaaaaacagaggattgcaaaacacagaaaaaatatagtaatgaccgtttgattggaccataggaaaaacacaggaatttgaggagagataaagactcaaaggatttcttcttccatgaggttctacctcttgttaaaattcctccaaaacttgtatggaaaaaggcattccataggaatttcataggattccatagggttcattcctttgattcaaggctttgtaggaaaaattcctatagcaataaaatcctcttaaattcctatgaattttctttgaatcaaagggggccttagcctcgaattacactattagcatatgctgttagcctttaggccgttattgaaaagctcacatcctttaaatttttgcttaaccgtatgctatttctgaacactactctctccgccccaaagtaaattcatttatacacataccaataaaaaatagaataaacatgctttatatcaaatatcaatacaactattttttcgctttatctactcccataattatttcttatttttacaaactccgatacaataattactctaaaaataaatttatttcaagtaaaacaacaatagctaaaaatgaatattacgggagagggagtattgaacacaagtgcaaacatgattaaggctgtgttcgggagtgagggtcccggcacataaaatgaagcagcgtttaccacatgattaattaagttttagctaatttttttcaataatagattaatatgatttttaagcaactttcgtatagaaacttttcacaaaaagcgcaatgtttagcagtttgaaaagcgtgcgcacggaaaatgagacgagggagttgggaacaactccaaacgaacgcaacctaaggctgtgttcgtttctatatataggttgggaacccctctcttgtgcatgaaaaacatagcggtacattagcgtgtgattaattaaatattatgtttttttaaaaaaaggatcaatatgattttttaaaacaactttcgtatagaaactttttacagaataaaacacaccgtttagcagtttgaaaagcgtgcgcgcagaatacaagagagagggttgggaacaccgagcaaagaacataggctaaggccattcacactgcacctaggtgtcattccccttcacctaggcatagctcggagcctcgcaagaacgggggcttttgggcccacaagagaagaggtggagaaaggggaggtattggctcgttcttcgttagaatcgcagcttctaggcccacaagagaagaggtgaagaagggggagggaggggagaagcgccgatgccgatggcgatgccgtcgtcctcccggatctgcgctggccgcgccgccccccgatccatgcctgccgccgaggaaggaggccggacggtgcgccatacggggagctctgcccggtgcggtctaagcttggaccgcgccactgcattgccgcctccggccccgatgaggagagatggaggcgtggagctcggtgccgccgctactccaccggcgctcgggcggcgacgtcgccgccttcagccccgacgaggagaggtggaggcgtggagctcggtgtcgccgccgctttgcttcgtccgtccaggagagagagtggtgcggaatgtgtgagaggggagagggagagataaaagggagcggagagagatagatgggacctactccaagcaacatgcattgtggagtatgtactatctccatcccaaaatataatactccttctgtttcgaaatgtttgacaccgttgactttttagcacatgtttgaccgttcgtcttattcaaaaacttttgtgaaatatgtaaaattatatgcctacataaaaatatatttaacaatgaatcaaatgatatgaaaagaattaataattacttaaattttttgaataagacgaacggtcaaacatatgctacaaagttaacggcgtcaaacatttcgaaacggagggagtaacttttagctatgaatcgtccagttggaagtctttcagaacgaacggtgagtgccccaagcgctttggtgatactccagtgtgagcgtgactgtgagtgaggtcacgaaaatgttttgaagcggtttctcgcatggagctgtgcaggtcgtgatggcgcctttggtgatggtcagctgtaccctggagcctctcccgcagtagcagcagcagctaaggcagagagagacatgctactatggtgcacggagattggagatggagagtggtcaaaggcgtaagcaggcatgcatcgcttcatttcagttcagggggtagtctcgctgcttttcaggaggaaaggctcgccggtctctgaggccattgctgaatgaatgataggattgagcttttgttacaaaggagtaaagagagagaatatctgcacgtgactcggctcggattctactatagacgtgtcacgtgcttgtgtacgcggacggcccgttgcaggcccatctaaggcctgctcagatgggtatccaaattctcatgaagtgatattcagtcaatgaaaaaaaaactggcgatgcaaacatgccatgattttatcggttgtactatatagtaattatgattagttaatttttgtcgaaataatagtaccacatccgttccgaaatattgtaatttaggatgagatttaggctttgttcgtttctcatggttggaaacgttctcctccggcgcaaaaaaaacggaacagttcattagcgtgtgattaattaagtattagtaaaaaaaattgaaaaataggttaatatggtgtttaaagcaactttcctataaaaaattttttacagaaaatacaccgtttagccgtttaaaaagcgtgtgcgcgaaaaatgagtgaggatagttggaaactcttagtgccgaacacaaccttaatcaatcctaaaacaagattgagatatgtccagattttttgttataagatgcatcaaatcaatgttttgggtaagatatatcaaatcaacgttttgggatgaagaaagtactctctccgtatctaaatataaaggattttagttggatgtgattagcgacggagggagtatgatagtttagcaatacaagcatgtcaagcagaggctggtgtgagtccatcatctgcagcgtcatggattacggataaaagcctgctgactttgctgtggtttagtgcgcgcgtgcatggagatgaccagatgacagcagattagcaggcagagtcccaagccagcagcagagccagagtccactaaatctgttgagcgtacgtgtcttcttcatccacccatgacgtccagtgctccaggctgctgcctgcctgcctgcgtttttcttgatccttggggattctctgctcagctctgggctctggcactgcctgccgacaaaaaaacaaaaaacaaaaagggcctgtccacttggatgggccattattattgaggcccatccaaacaaggtaaatcatgagataggctaatttgcctcctcctcggaataaagtcattcttaggccctgtttctttcagcttgggattattataatctagattattaagtcagattactataagttagattgttataatctgtagtagaataagcggttagttgtttctttcctagattattagagcctagattattgggtttgtaagtctaaaaagggagtggggtggcatggtgggtaatttttcatccaataatctggaaaaagctcacctaaatgagcttatcagattataataagctgggctccagattataataagctacttcaataagttgtctgtttctttcagcttactcctaataatttgtattataataatcccaagctgaaagaaaacagggccttaacctctcacggttgttttcaaataaattcatttttagcagtcattacatcaaagtttataaagaatagagaataaatatactgagagtaggcaaagtgctgaataattgcattgcgattcgataagttggagtattttagtatttgtcgttttatgttggtatacgtaggatgtgtgaaaaatgattttacattttataacggatgatgtagatagcactaaattgctaacggtacaaggaaatggcggtggctttggggccttcaagacggtggaggctgtaccgtaatatggagtatttgggccaaatatatattgggccgggccgagttttgttcttccacaaagccgtcgtggttatttgctgctaacctcaattcagcagatgaaatcatcaacatcatgtggccgtgccactttgcttcctccatacttaacattctgcattctagctccatccattgcctttgatttcttctgcaccaaatctcatcatatccaatctactttcttaccgtacagttacacacgtaatccatccattcttataaaaacctaaccttgttaggggatgagacttaatctagtacaatgaatttgaataatcctctatctagatttctcatactagattgtgtcctgttttttaattaggttgggtttttttaaaccaaagggagtatctataaagatcgagcttcatcgtagcgtctcaaaaagctttcaaactatatactagcagaattatccaatagcaaaaccgttcttttcttagaaaaaaaaatacagccaaaaagagctttcccaaccaaattggttttgagtcgttggatttcaaacggacgcctcggattagcgcgcgttcggtgcgggagacgttccaatttccacgcaacccgaggatgacaatgacatgtggaccccaactgctactcttgcgctgcgtgcacacgtggagcgagttgctgccacgcgcgtgccacttgtcatgtgttcggcgtcgggcccacacgtggcaggtcttgttcgtttgtaccgtgacctcctctgctttttcagctactctagctgtctagcacagagcagagtagacagagaccaactcatcgctgggacacgtcaccttcctttctatgctctcttgatgaaaccatctctctctctctgtgtgcaaaaaatcgagttacacagagaaggcatatgagataattgtttgacctaattagggaaatgaacagcagtaaaatgcatccatcataagcacgccaaaacatcatctgatgagtttacttccattttatttttatttttttccctgatgaatggtgtttacttcactttgctcgtttacttcgatcggtctcgccaatcctaccagaagaagctaaaaacggcctctctttagaaataggtgaatgcctcagcctcatctgagcaatgaacacagaatctcgaccgatcaaggaaaaatgttcttttctgaacttgtcttctctgcatcctttccttgccgccggccaatttattgactcaccgagaagtttgataagtacaagagaataacaaaataacatggttgttgtgcagtctttttttttgcttcttcttcttaaacagattcttttcatcttgagccattgttgatctttgctcctctggtcgtcaactcttttctcctgtttcagggcgtaggacggaggaggagatgagaaaaacaagaacacttccagctctgaatttcactctgcatgcataagttgcaggattaggctgattgcagaagattcggtgagttgtttgacactcgagagaacttggtttgttttgaatttcggtctgtttatttgacctgttcttgtacctgaaacttgaaagactccgagtaagaggggagtaaacgagtgataagccccgcgatttgttagcggctgtttttcagctaaccatctttcaatttctgtactggtttgtcagtgacttctgcatgtggctgtgttgtgcgactaccttggtccttcctgattagtgatggggtttagcgcatggtaatctgtttaatgtgcatgcatgccgatgatctttcatgtagactgtatattcctgtgcttagaagccatctgtggatcaaatccatgttgtcttccaagcaattagctcatctgtgatttgatttgtactttactctttgggaagaatttttttgtctttatagcttttcttgcatgaattccattccatgatgcatttggtgtttcttgattggaggcagtgtttgaatgcaagggtcaggttgcgctggtaggtatctgaggaattcaggaattgaggatgatgagtaatggccacagcaacagcagcaagagccttgaaaggtttatatctcggagggctctgcagatggggagctctgctccctgcaagacatgggcactgggcttcttctgtggtgtctgcattgtgtacctgtttggtgttgctctcccacctatccaaatcctgatgatccgatcggtacatccaccggttcggcgagcaatcttgttgaattcaacatcaactgaacctggtattttgcgaacaccatttcgcataaaaaattcagtagtagtgtagtactatatgttcatctaggctgaatgtattttttcttttccttttagctgtgacaatgtctgtgtaaccagcttcttccatgcaggtggagctacagaaacagatgacttatctgttttacaagaaaagatagaaatagccaccaatagcaaggacatcaatgaagctgataaaatgcatttgtataatgcttggagcactttactggatacgaccagtgatgaagttatgaaaagttcagacgtgccgcggccgcctcatctggagaattgcaggcttaaatgggaaagaaataagaaatttgacagttatagcgacaacggcgtatttcctccttggacattatggaaagggtcacttggtcttgagttattcaaccagaactattcagattcagaagagtggaggcaaatgtttttcaggtcaaatgctaaatctgacagggcgccatatccaccttgggtgtgtaaacttgcctgaactcgtaattgtcttgtcagtactactatgaatgcagtattctaacttttgagttacaacaaaactttaaagattgcaggatcagatgaagaaaactatccactgaccagacaagtgcagagagatgtatggattcatcaacatcctccaaactgcagtgatccaagcttgaggtttctctatgcagactgggagaggctaccgggatttggtataggtgcgcaactcgctggaatgtcgggacttcttgctattgctataaaagagagaaggattctagttgcaggatactacaaccgtgctgatcacaatggttgtaaaggtaggaacaatccagcttaccttgtagattatgaattgataatatgatatgtgtagtgctacctcaagttgtaacttttaactgacatgataactgagataactgtcaatgttcaattttcaggcctagcaagatctagctggtcatgctactttttacctgaaacatctgcagactgccagaaacgtgctttagatctcatgcaaagcaaagattctagggaaaatggaattataaaagttaaggaaaactatacctccaagcaaatatgggctgggcatatacctaggtaccatttcgatgcgctggtcctgtttctggaaagctaaacacgcacccaatactgatgagctatacacatttactccctccgttcctaaatatttgacaccgttgattttttaaaacatgtttaaccattcgtcttattcaaaaaatttaagtaactattaattcttttcctatcatttgattcattgttaaatatacttttatgtatacatatagttttacatatttcacaaagttttttgaataagacgaatgatcatgtttaaaaaagtcaacggcgtcaaatatttagggacggagggagtatatctcattcatcgctctgttcttgtggctcttgccgattcatgcacatgttttctgaaacctgctgttatgcaggatatgggggagaccatggaaatatatgcaaccgacaacagagatagatgggagattggttaaaaatcattgtaaaatggatcggagatggtggattgcacaggtgtgtacctcatgccaagatgaatgatgagcatattttgtgctattcataatggggatgcaaatatgcttcatcaacctgaaacttccatgtaggccctgagatacctaatgaggttccagtcagagtacatgtgcagattactgaatgtggctagacattcagcatttggcatgcaggcagcaaagatggttcttgaaaatgtcccagatccaccaaaggtttgtattagcaatctgaagatttttatgttgctttgttccgtggagagttttgtctgcgcatcattcggataaagcaacattagcactaaccaccttacttttttagataagtaactgaaagatttcacaattgcagcctagcattagcagaacagaatctgacattgagcgacttgtgtggtcggagcataaaccatatatacccgggcctcttatcagtatgcatgtaaggatgggagataaagcttgtgaaatggaagtagttggctttgagaaatacatggagttggctggtcgtcttcgaaaacgttttccaagtctcaagaacatctggctttctactgaaatgcaggcaatttaactcctcaattctcatccctcgtatggtgtaaattaatttcttcatttcattggtctgtaatttaactctgctaatgctgaaatgtaggaagttatcgacgaaacaaaattatatcccaaatggaatttctatttcacaaatgtgacgcgccaagatgtcaatgtgagcatggcaatgtatgaggccagcctgggccgtgagaccagcacaaactatccccttgtcaatttcatcatggccactgaagcagatttcttcattggagccctgggatcaacctggtgctacctcatcgacggcatgcggaacaccgcaggaaaggtgatgtctggctatctgtcggtgaacaaggaccggttctggtaagcaattcagaagctgctaaaccttgttcattgtattttagctcctctgaatagatatgtttggcctaagtttgcttctgtacggcaatagggcatgtatatatgcaccatcctagcagataactttagcgtgtgaaacttctgagctaataggaaaacagtatcgttatatcaaatcaggtccatatattttgatctggtatccacttaatcctagatatatattatcctgaggtccagtgtacccaagaaaaaagaggatgcacttaccaaattttcagtggtactcataatgctgataagtggtacacgagagatccaattgcagaattttatagtagtatgacagtaacagctatgccatgtaaaagaaattgacacacaagtttcctgtagaacatcggtttcaaaaaaaaaaagtttcctgtagaacaaccagggcattctcctctttgtcaaccatttgatttgttgaagacatgacccaaaaaatccagtgaactttgatgaatacacatattcactaatcactagcctttctctctattttttttaaaagtacctttacggtggtctgtactagtagtgttttactactagcattatcatcattagaaatgacctcaaccattgatttatgagatctactaccagaaattggatttgaaaagatgaactttctagatttttttcgggaatacgcaaaaggattacgcacttttgtattaagaggaataaaatttacacaaatggcaaacaaagaagagagagagagagagagagagagaggagaggagaggagggggggaagggaggaagaaaaggaaaacaaggacttaagcctattctcgcgattacattgtgacgaccgaacgaccaaacgaccaaacatgctaactaggaagcgctggcaacgggggatgggcaagacgccaaaggatggcctcttacgccatggctgcgacaacctcaggctagggccgggaatggttgtcgaacacatggttgtcccttttcattccaaatagaccaaccgccaagagtcacaatcgtgttgaacccacgacgatgctccctcggaactttgagccgacaggagcagtgccactcaaagaaggaatcagcgtcagagggaaagcactgagggaggccggggcttgaaaggacagtccaccacagctatagggactcaaggcacccaatcagaatgtgatcaactgtttcttccagttggtcacaaaagacacaataggttgggtgcggcaggccacgcttctccaatcggtcagtcgtccagtagcgccagtgagcgaccagccacaggaagtagcgacgtgacactgaggtggggcaaaagagcgccagattggtaggtgctgaaacgagatcctgcccgagaagagggcaaggtaagctgatcgggtggagtacgaccccgaactctcccacctccagttgaaagaaccaagatggccctctgagagagtcgttgtccgcagcaacgaccaaatctgcaagttttgcagtattgcatgaactgtctagattgattctactaccaatagagaccactgtaaaactccaccttttttttacataatggaagtattgtttgtggcctctacatcaactatgatgcacatggccatattatggacaccaggattttaaccctagtggtaagaatcacgcacccacgactccaccaccacaccaatggtgcttcaaataaatggatcatttcgacaaagttccaatgacagatgagaatgttgaactggccatttctatatggagaaaggaacactgtagcatgaacctatgcactaagaattgtgctctacaaattttctttagccaaccttttccaagtcaccctacatgagtagatgacatgtaatactttacctccttttgttcttctcctaataaggtaccattctctagtgcttccatttgcgattcctggccaagagtgatgcactagtttcttctcaacaacccatccatccagtcactgcttcttagagatggatggatcctgaaactctgaaagggacactgtaacagtgccctgaagaaaaggaacaatgaacttctcgtggcatacatcgtatataatgagtgcaacacatcacaatgccaaggtagtggacatgagcacatcgcatttcagcttgctccccacttccaaagattccttctgaatcctatcagcttctaccatggatcaagccccagggggctctctccccttggacaccatggaatgagaactgtgcgcacgcgcaatggcgatcgcgccttcggtggggcggttcttggagccctggtgactccattgacctgatgatttcaagttggatgatttttgcaaatgcaatcagtatttggcaatggtttgtgttgtggttgttactgtatgcagtggatgcagatgtatgaagtttagcagcagtaaaaatgcactactgcatggttgatcattgcttggcctcaatggctcaatgttaggtatcagaattcagaaagtggtatattctgatggatatatagtatatggatgccatgcatccttatctgaagtctaggaggtagagttactatagtagtagacgagtagtgccctagcaatgcatggaacttgtgtgcatttttggatgattattgtgaggcaaaactgtagcaaaaaatgggtttagacatgggataagagagtgcgttctctgtagtgcagagtgcatcttctgacttggaatgcagattagaacactaacagttgtatcatcacttcagtcaaaaaacacttgtattattaccaggtatgacgcatgactcatctggaacatattcttgaaagatgcagcatcattcaaaaggaagtcaaccggttagtgcattatctccaaatttttgttaaaaacaggaaatccgatactaaaaggtagtgagaggaggcttcatgctgctgacgaaccgtgcaaagcaccaaaaacagttgcagtcaccatggacaagactcatggtcagcaaactgcagaaaaacaacgcatttccggcaaaaacttcttccggcttcagtctgaaggccgagaacaaatctgctacgaacacatccaactccaaatcgtgaccatcagtctgaatcgcatattagaaaaaaaaaagaggagaaaatacataaaagaaaagaaataaagaagagaaagctgcttttcttgtttctctttacagctgaaaaccgctctcgtctgcaactttttcgtgtatcatcagagcatccaaaaggaggagaattgccccagacaaattgtgaggatcagagggaaacaaccagacacacacatacacagacgcatcgttatgggagacgtcagcctccaccacctgcactgcactggctaattttgatcactgaattaagcacacacacccctactaactaatctttctgaaacacatagcaattgagcatcacagtccctacggtagagatcattcgcattgtttaatttaagagcaattttatgaagaggttctacgaggtattaaattttactctaaatttttttgtatctcatggtaactcctcaagtactgtaaaattgctcttgatttaatggatcatacatttttatgctaccaccttaacaactggtagtagaattcatcaatcgatagttgagatcactgctactagtgatagttctaaccgcagtaaaagtacttaatattcaatgccctgttctctggcattaaaatcaaatcagcagatcattttaggatcttagggatttggaattcataaatctatatgatagtgacctatttttgcccactaattctttctttcccatgtcaatgtccatgagctgcaggaacaatagggatcacctagcagcacaccaacttgtgcactgcccacttaggactttggttgcaaatatacacattttttttcagataatgaaatgtatacattttatacatcatcatctgctcttataaagtagcacttctctccacttagatcctacatatgtgcgatgataaatcactttatggaaaaggattggcagggcgatgtttaattttttgatgaacaaaacaaaggtcggcataaatggacctgaaagtagaaaaaaaagcttctaatcacaatagcctggattaggaaaacgccagccatacgctcatctttttatcatcaaattaaagccaaatgcagtgaccattttaagatcacattatgcactttctttattaaaaaaaaagatgtgccaaaaaacatagtattattgtataaaagattacataattaattgggtccacctgaaatttcttttcgtacacgatatagaatctaccacttcgagcttttcctaaagctagcgtagatagagatatgcaaactgtaaaatcacttagcaaagtaatcccacataacttctcagactaattatctcttgagaaagaaaacttgaaacaacttgcattgtagtagacaatcatatatgaagcgactgatatgacagattagtagtacaattcagacagattagtggtacaattcagtgtccaatttgccgctcgtcgtgaaaaacattaattcgatgaaatgaaagcttaattaatcaaccaaaagatggctttgatatcatcatatggtttgcatcgtggatcccattgagcattgatcgatctttgtcacacatctctgatcatctgtcagaaacgtacaagactctcccagatcacagcacgtttatccggatcaactcctgaaaagatgcacattccttggtggaatatctttgcgcacgtaaaagttcatatacatacgtgaagattacaaactcattaattacgtgctaactagtaattaattagtaaaatcaatccggacacactagaacactagaacatcatgtaattcagaaagcaacgctggtttaatttctcactgacaaattgctgcacttgacacttgtcaccctcaaatctttcatattttgcacatttttgttgtgattcctttagctaattctgctctgttacttataaagtacagtcattgtgcacaattagcttagctccattactcagaagtatgcagccatttcagtccaatcagttgtgcattatgcgaagcaaaatttaactataactttgtatgttctattcctatccaagataccaaaattaataaactaaagtgcaattgagagagagatgcccgattagccacaggtttcttagtgctatctgaacttacgcactatatcattctgcaaacaaacgatgcgtgcacgggttaaaactagaatcatactgcaataagttaactatgggcatagctagagattagtgaatattaaacaagtcaattagccaaccagcatcctaaacatgtcctaaacagaaaggaccaattagatggctggatgaagcttttaattaaactgactttttcttatttttggaagcatgagccaataggaggatggtttagaagaataaatcatgcagctagtgttgcgaatgatctttccattctggcttgggagaaaaaaagaagaaagggttatctctctctctcatttttaggtcacatttgttgtgaagtggacactcatgaaatggcaacaacagccagcaaaggaaggaaggaaggatgaaggaaaaaaaaaggcctttattatcatgttttgcattcttgttaaggagcattaagccctgaaaagtaggtgctagccagtgccttgcacccttggtgagatttgttaacatttaattaagctatctctacaaacccttctcttgaggctttctggtttgtgcttagtgacttggtttcctcctgaaaccaacaagaagattcctgcagagaaccagaattatgctgtgtgcattgcacagttgggccagttagtcacggcaccagattttgacccttgcatgcaagggacccccaaaaagagagatatatgtgcttcccatgagctgacacttgttttctttagatgagctgacgcctgtttgttgctgaataatcatatggattcctatcatcctggcatgcacaaacatatcgctccaagaaactttacaacgtcgatgtatttgttctgcccatatggtgaccactggaaaaaccactatgaatatgaaccgctagttggctgtgtacacacttgttggtgtagaagccggcttttgatccattaataaaataaactgctagaacaaatgctaggaaaaaaacaataatttacagcataatgcaatttttcaagaacgagatttcttgaagagaacatcttacaaaaaaagatatcgtgcgaatcacgcatgattttcttttttagcatcatattttttttcattttctggtaagtttgtaggccataaaaattttatatgtctgattctaattctaattcaaaaccatatattttttttctaaatgtttctatattaatagtctctaaatataaagtttctttgtataaatttttaaagacaacatttcatgatagacacgacattgactgaacatgtttgcgctagacccagacacacaaatattggcacattaaacctacctaacatcataagctctatggtgtttgacaagactatgactactatatttttttttcaaaaatataagacttcagctagtttagagtatgaatataacaaaatttagctggacctataccaaacgaggtcggccgggtttcctattgtttgtggcgagggaggcagcaagcaccatatccgaggtgtcatggacgtgtacgcaacgcgggtgtacttacccattttttcttcgatctctttcttctgttctgcacttctgcttggaccccatgacgtgcgacgcaacggcagctgcgaccacttacactgcagtgcgtaacggacatggaggcaaaataacgcctcaccgtttcaatttttttttccgttgcggaaaaaaggcgcgaaatacacgtcgtggagacaaaatttttcgcgcccccgcatccgcgcaggggagatggatgtgtatgtacacacacgcgtagatatgttatgtacgtacgtaagcgaactagttaattaatgccaggtaatacgtacgtatgcgcgcacttataatacgagaaataaactggctgacctaatattttcttccatttatgacatgttgttttgtgttgaaggactgaatagctagtgatttgtgatagttatttaagggtagaagcaaataaattactttctctctttaattttatatattagaagtcattttaatttttttcctaatcaaatttatttatgtttgatcaagtttataaaaaaagttatagcattttcaacgtaaaataagcatattatcaaaatatattcatcgctagatttaatgaaactaatttggtattttagatattgctaatttttttcctataaatttacactagaaaaaaaatcaaaacgacttataatcagaaaaggagtgagtaaatattaactagtccctactattataaaaattgaaaatatttttgccggtattttggtacgtcatccgtatttgagtcggtttttaagtttatttgcttttggaaatacaaaaggagttgtataagaaatttcttaaaaaaactcgcatgccaacttgaaatgaaagtcggactcctaattgcacacagtgaatttcatcctagctaaacatataacaataataagattaaaatatcattcacccattgcaatcgcatgggcattttttctagttaaagaatatatttgaaacagcaattaaaaaattaaattcaaatatagaaagttcttataaaaatcacgttatctagaagctcaggaaaaaaaaagtgtgcacggcaaattcgattcagtttcattaagcgatcgatgttgggcggctagttcatttaatgatggtcgcgtcgacgccgtcgatcgatcataccagagccaaccgtatacagtgaacatattttttcttttttcttttaggatgaggtatgcgacttgttagtactgtcgaccttagctacacttttccgttgcacggctgcgccactatccgaccaactcagctcatgtgcatgcatgcttactgtgtaaccgatcagttcatatttatctttttttttaaaaacacacacacacacacaaataccatgtactccactacaattgtagatagataccttagagcagtggtgtagttagaattttctcacgcctaaagcacaactagtataatttacataatttacctttatttttcgtgttttgaagtttttaaatgtaacttttaatagatatttaagcttagggcaacagccctaactgccctacccagttttcgtcactgcgcctagagaaatataccttttttttaaaaaaaaagaaaaacactaaaaagaaagaaaagaaaaaggagtaggagtcggcgtcatggccacgtcaggccggcgtcgctgcagcagcggcggtggcgtggcctccattgcgcatacatggagagcatccggctgatctggtccctgtactagcagaaccctagctaagcttagctccattgtctccaacttgcgatcgatccatccatccatccattaatttccgcgatccaatcgaaccacgatatgtgtaaagctatagcatatctacagtcactccatgctgcaccgcacaaaacactctaatcagaattaattaattaattaattatataatcatccatcctattttaaatacattagcgggtttccgtgtttgtcgtttgaccgcacatcttatttaacgaatttataaaaaaaataaaaaaaagtcgcgcataaaatattattcatgttttatcatctaatagcaacaaaaatactaatcaaaaagtttaaaacaaaacgaacgatcaaactttagacatagaaatccacatacatacttaaaagtttacgaccttaattagtcctactcccctggacactgccctcttctttaattaactaaataattaattaacacatgagctgattagtgatactaataagaaaattatagtgcatgtcaactagccaattacttgattagttattgtctttttttagaggaggcaactagctaattagcagctgcatgcatggtcacctgagtgtgagtggccgagtaggttaagcaagggtctgtctctgcttgattcctgcagctgctcatgtttccctcactccattgcccctgccttttcgcccaaaagatgggccgctcaaattaacaacccggcctaaagcaaccggctttctttcctttctttctttaatttctttccttctcctctttaattctctgcgctacaaatatgtatacactgccttactctaattagaagtaattacttaatcaatttctcccttaatacagaattagcatccaaccagatcatgcgacgaggcttaattacgtgtacataactagtatataataatataactatatatgatcccactgatcgaattaagcaactaactaagccactaactgaatgaacaggacacaaacagttctacgaatggcatggtcgatccccactatgtaagtgtatatatatatctctgaattcagatacacctttctactttaatttagctaagctagctagctctacctaatattgtaacatacaaggccactatctgtccctgtatgtgcaccagcagtgccaaatttcgctgcatgcttagctaagctaagcttatatagcaggagcactcgaggtgagcagagagagaggattgaagaagaaggagaagagcaccaagctagtagcctgatctctctctctctctctaactgtctatctatataagctaacaaggcaggacggttgttgcttgcgagatcatccctgcctgcctgtccctttcctgcatccatccatccatcttgatcttctcctagctcgattccacacatgtgaacgtacgtacgtttcagttaattgttcgatcgatcgatcgatcagctgctgctgctgctgctgcaacgaggaagaagaagaagaagaagatggtgaagttctcgagggagtacgaggcgagcatcataccggagtggaaggctgcgttcgtcgactacaagcggctcaagaagctcatcaagaggatcaaggtcacccgccgcgacgactccttcgccgccgccaacgccgcagccgcagccgaccaccttctcccgccgccgcccgcagagaaggaagccggtggctatgggttctccattcttgaccccgttcgcgccatcgccgcccgcttctccgctggacaacagccttctgcctcagtacgtcgtcgttgtgtctcgaatcaaatactaactaataaacgtgtattaattaattaatacacatttctgatgttaatacgtatgtgcatttcgcaggaggatgaggagtgcccggacagaggggagctcgtgcgatccacggacaagcatgtataaaattaattagttaatttgattgtaaataaaactaagtaattaaattgattgtaaaaatggagatgcatggatggatggtgtaggagagggagttcatggagagggcggacgaggagctggagaaggtgaacgcgttctacacggggcaggaggcggagctgctggcgcgcggcgacgcgctgctggagcagctccggatcctcgccgacgtcaagcgcatcctcgccgaccacgccgccgcccgccgcgcccgcggcctcgcccgaagccgctctatgccgccgccgccgccgtcctcctcgccgccgtcgtcggtgcacggctccagcggccgctacctcctctccggcctctcctcgccgcagtccatgtcaggtaggtgacaccaaccacccacacacatgaatcctgggctagctgcacatctctttatgcatgcaatgtcatgtcatgtcgatgtcgccgtcgtcgtcgtcgatggcgtgttttgcagatgggagcctggagttgcagcaggcgcaggtgtcggagggcgcggcggtggcggacgaggtgatggcggcgctggagcggaacggcgtcagcttcgtggggctcgccgggaagaaggacggcaagaccaaggacggcagcggcaaagggcggggcggcggcggcggcggaggcggaggcgtgctgcagctgccagcgacggtgaggatcgacatcccggcgacgagccccgggcgggcggcgctcaaggtgtgggaggagctcgtgaacgtgctccgcaaggacggcgccgaccccgccgcggcgttcgtccaccggaagaagatccagcacgccgagaagaacatccgcgacgccttcatggcgctctaccgcggcctcgagctgctcaagaaattcaggcacatcttccctcttcatctttcctttttgccatatctgacaagctaaaaccacgaagtcacggtattttagaacaagacttgccttttgtgtctatgtatattgtcttctatgccatgcatgatgcatatatatacgcatttgtaagctatttagaattctgatggccaaacctcacactaatagcatgcaactgatcgatcacactaattgcatgcacacaaatgatatagatagtttggttaactgaccaactaggaaaaaaaaattaagttgtttcttcatagatgtatatctaacaaattactactatgaatattagttgcagcatgagtcatggagcactgtgtgagcagcacacaactacacctgcactgcacccaagcatgcagtacagtagtagtttagtcaaatttcaaccccgttttgcatggaagcatccgtgtaaatcacgtagccatccatacaccatcctgtgtcacctgaaagcgactgtttctcctttcaaattactaattcttttgtggtttttgaaaaggtagattaattcaccggttattttaggtggctgtctttatatttcttttacttgtcaattatggtgttcttgtggttctgacggatttggatgcttttttggttgcatgcatggatggatgggagcagctctctcaatgtaaaggctttcaccaaaatattgaagaaatttgtcaaggtaatatactaattagccacatctgtgcccttttgaaatggatggatggaagaatgaagagtctaaataatagatgataaagattaaagaaaaccggtctacatatataaggcttctaggagaataaagttctaagtgtactattagtagtttagtaccctcaaagcagaggtactagatctcattctcgacagtgtaatcctagtcactagtcagcctaataacatgagacagcataaacattttcttgcaaggaataatttaattttttaatatatttttttaaaaaaatgctactccgagctgacagtgactggtacgaactgctttgcatttcaggtgtccgagcaacagcgagctacagacctgttttcagagaaggtgaagaggtcgccatttagcagctccgacaaggtatcatctggtgctccacaatcctactgcaaagctgcacaaacatacaaattcacttcaatcagttttttgggggatggaaacatgtctctctgacgaatatgaactgaagcatgcgaaattctgaacaggtacttcagctagcagatgaggtcgagtgcatcttcatgaagcatttcacaggcaatgacaggaaggtggcgatgaaataccttaagccacagcagcccagaaacactcacatgatcaccttcctcgtaggcatgtagctgagcaacttcaagatcagaatatcagatctgtcatctgcatttggcacacaaatctaacttcacttcttcttttttttcatgttctaatttgcaggtttgttcacgggcacttttgtttcactgttcatcatatacgcgattttagcccatgttagtggtatttttacttccactgggaactcagcctacatggaaattgtgtaccatgttttcaggtaaattcttgagaattacggttcagttctaggggtaaagcactatttagaaatagattttttattactgcgtttgtacttggtacttctgttcaggctatatatgctctgttcttgacaagagttcaattgattagatttagcatgtgggctcaatgtttgcaaatttttcaaatttcagacttaggacctcatgataataaaagatgcaattttacctcaaagtaatgtatagatgtgaccttgcttctgcagcatgtttgctctcatcagcctccacatcttcctgtatgggtgcaacctcttcatgtggaagaacacaaggatcaatcacaacttcatattcgatttctcctcaaacaccgccttgacgcaccgggacgccttcctcatgtctgcatcgataatgtgcactgttgtcgctgcactggtcatcaatcttttcctcaagaacgccggtgtagcctatgccaatgctttgcctggagcactcctactagtaagaaacataaactttgggaaaatttggtaattcagctctgtttcatgtactgattttcagttctcaactcggattctgttgtttcagctgtcaacaggtgtactattctgtccatttgacatattctaccgctcgacgcgatactgcttcatgcgtgtcatgcgcaatatcatattttcaccattctataaggtaaagactaaagacctcatgagttttcttatcacaaattgttgaaagcatctatctgataagcaggctgctttgacatgcaggttctgatggctgatttcttcatggctgaccaactaactagccaggtaatactgaagaaactgaactttacactagagcttttgagagttggagctcagcatcttatgagtgaactggtgctactatctgcagattccactattacggcacatggaatttacagcgtgctacttcatggctggaagctttagaactcacccatatgagacctgtactagtggccaacaatataagcatctggcctatgtgatctcctttctcccatacttctggagagccttgcaggtatgaatctttagatgggaaatactaacgattaacaactttgtttggatcagtttcaaactaatagctgtgtcatgttttgaagtgtttaagaaggtacttggaggaaggacatgatatcaaccaacttgctaatgctggaaaatatgtatcagcaatggtagcagctgctgttaggttcaaatatgctgcaacaccaacaccattctgggtgtggatggtcatcatttcatcctcaggtgccacaatttaccagctctactgggactttgtcaaggactggggcttcttaaacccaaaatcaaagaaccgatggcttcgtaacgagctcatcttgaagaataaatcaatctactacgtatccatggtactatgcttaatatacttcatttctgactaggctagaaaattccagatctaggacactaatgccttcaaataattacagatgctcaatcttgcacttcgcctagcatggactgagagtgtaatgaagatccatattggtaaggttgagtcgcgcttactggatttctcgctcgcttcactagagataatcagacgaggccattggaacttctataggtaattggaagtacttttacaaggaacatcaattttaatttaatgttatggtgtaacatggtgaaatggtttatgggattgcagattggagaatgaacatttgaacaacgttggcaagttcagagcagtgaagactgtcccattaccattccgtgaacttgaaactgattgattaagcagtaggacatgccggcatgctgccaacatcaaggccagtaaggatcagagttccaggaatggagatgctgcttgccgctagatttggtacataagtggtaataaagtttgcagagaccattggtgcacaagaccatgatgttgctgattaggatggaataagcttaaatcagagcagctaatcgaggcagttcgtcaaaaaagaaggaataatcccttcttggtccgatgaagattgttgggcgtcatttcgctaacaagatcttaattttgtttatggttgtgttatgtatgtatctggagatggatgcccaccctccaaaaaaaatattccatgaattcatatgcaccattgcatcaaactgaattcaaataatttgccgataaacaaaataagtaagatgtcaatgttagagaaggaaataagaacacaatggggtaaaataaacatgcaatagatattaattaactgaaggggaagaaacccaatcatttctgctaatacagtgaaagcaagatgcttggcactacagatgactaaataagctaaagcataaacatagtacaaatatattacatgtcgatcacatgatgcacacgataaatagatagctatgacagatacctccattgtgctggacggtctcttgagacaagaagaacccttgatgacgagtaatcgaatgtagggcagtacaaatcatcaaagccaatagcctctcttactccaagagtggctccacggtcaaagctgtaagtttgttgaccgtcctccttaaaggcgtcaaatgcaaatagtcccataccacatgcagccaagacaaggttggagttgccccatacttgggttattgaagagtgatggaagtgggcattgaaatcaggtagctcataggttgcaacaagctttccctttctcagtgaatattgctgaactcgtgatttcagacccccttttatttgcagcctaccttctgtgctcccaatgaataccgagtcaccacgtgagaagattgaacttgctgtaccaccatgtcttgccattttaagaccgatgccagcaggtacacgaaagtcaaatacattaacactttcttgtgtgctaaaaacaccatcatttccctccacctcacaggaactaactctgcaaaacagaacgataaacaagttaactttgaaaacatgtcagctcacacaaaacagaacttacatctcctttagattagttacatttccaagtttcagaatcatcaatgatcaagacaaaaaaaaatcagctattggtaaatgaactaaaaaatcctgcatttgcaagcataagccaagttcaaccagacaggatctagtatagtgttaccaatggtacacaaagggcattcaagctaataattccaggcgtacctttgacgaactcctccgcccagctctgcatcagtgttgttcacatgaaggcagtaaagctttttgccagcagaagcaacagataacaggggttgtgggttaagcgaattaacatcccacaacccaatcgactcagtaccagcaattacaaccttgcccctgctacgccattgtagtgggctggaatattccattccctgtacaggattgctcacttcccatttcatcactacatcaccatctcggatgtcataagctgtgaccatcttttgcttactagcagcagaaagcaggagaggcccacagggtctataccaccattgctgtctttctacagtagaaattgcagagctagatcttgatgaacctacattaggaagaggcccaagaacagttctggacgatggtactgaagaagcatgagatatctcctcaatgtgaaatgcttttgcttctctgctatagtaatcccagctgcaaaacccagggtccagtgcattgccagctgatgccgcaactacatatcttcctgagcatccgtcaacacccggggcacggatcaaccagcaatcaccccacatattatttgagatcacactcggaggcttgtattcagacttgaactgtcattttcagtttaatgcaatcagaacttcaaaatgttgtattaacataaattatgaaaagaacaaaaagaaaacatagtaatgaatcaagtacctcgcggtttgcaatatcatagtaagaacaggtaccatctccatgagcaagaagaacagcttccccctctgaaacaaaccatccaccagttgaggatttgttccctatccctaataactgatcactagagaattcctctgtttcctcctgtaaaatcaaaaaggacttgttctcctgttcatcaaactcttctagcttctctgtagcaagcaattcaatttctttgtcatggtttgggcctaccggattatttgaggaaccttggcccgatgtcttgctgctaacatctgctgcttcacagatgatggttttttccaagttcttcgctctgcggttcttgaagaagccgctttcttcaccatctaaggaagccagaaactccatggctatactattctcatcttcttgaggctcaagggaagaaagttccatatctgtgttacaatcctttttgacagccatggacgattcctgttgagtagcgctagacgatttgcagtctctcaacaatttatgatgtggaaagaacctcgcctctaattcatcagtattcataccttttgcagcatgcttcgggtcacttggctttgtaacagcacactctgcagcctttttagcataagagatctcacactcactattatctgcagtgccgagctgaatcttattatcatccttgacatgggaaattgccttctcaattgcagtaatctccttctggatattagataatatctgcttaggctcatccgggttattctcatccagcatctctttggtcttcttgatatctgtcgctatcttttggactctcccttccaatgcagctagtttctcatgcagcttgcttgggtacttgttcaaactagaaacagatttcactgatcccccacttgcagacgctttctcaaaaactctaatcttgtctgccagcttgctcttttcctcctgcttcttaggctcatcagtattcttctgctcttccctggctctgcaaggaacatcgtccacgtccaccacatggacagtgaatacagggatgacagcattgttgcctccgtcaccatccttctcagtagcaggaaaaggtgcaggtttggaagaagcttctgccgaaccagtgacactagagataactttcttgggatgaatctctttcaccaatttcgtatcaaatccatctttcttcttattgatttcgtcacctagcctggccttcacatcaaagccctcattgtcgccatcaatcccatcgcattgcttctttgcgttggtgccaaagccctctctttcccctttgatctcatcacattgcttggtcacattaacatcgaagctccctcttttcccactgatctgcttcgcctttacatcgaagctctctcttttcctatcaaccgcattcatttgcttagccttaccatcaaagccttctcttctcccactggtcacatcactcgccttcgccctagcatcaaacccatccctcctcctaccaatctcatcagcacgaggcacgctgcttgctctcctcgcatccgggaccctacccccaacgccacccaccgacctcctcgctctctccggggcagcggccctgatcccgccgctcacgctccgccgcaagcccgcctccgcctccatttccttcccgacagatgccctccccggcatcaccgaggacgccctgagggtggagacgagcttggaggactccacggagctcgggatcctgctggccctcgggatcgacgacgtggaccaccgcaccgcggcggtgggcttggagggcttggacgccgagttctccttcccggcagcggcggcggcgggggtgcggcgagcggacgacgaggcggagaaggccttgggggtgagcgggcgggatcccgcggcggcgggtgcggccttgccgcggtccttgatgcgggaggccatggcgatggtagggttagggtttggggggatctgggggaagacgagagggagagggagatggtttgcgagattttggggaaggaatggtttgatttgggaattttacgaccgggagaagcgtttcaaatttcgaaatgtttcgagcgcgaggccctgtggctgtgggcccaggcggcatgggtacaccgaaaagcgctggggccgcattaggtggggcccgctttgtcagtgaccgaccagttctgttctcttgttgggctaaggcccgtgactcggcccaagtgatgagcttctaagggcccgttcgtttgcctcccattgaaggagaattttaagcacacgcaaaacagtaaatctcataagcatataattaattaattattaatattctcttcgtcccaatataagtgcacataatacaggatatcctagtagaatatactaatataagtgcacctaatacagattattataaacttgaataatagagttattttcagtttttaaaataacttttatatataggaattgtttaagaatgtatattttaacatattgaaaaacatgctaatagaaaatgaggaagtttgaagttgaaaaaaaaaacagggtctaatggtaaggattgtagcgtctctttcagcgtaatccagctggttggacctctaattctggcattcaaccttgttttccccttaactattcgctctaaacaagccctcaagctgatagcgtagcttaccaaccggcaaaatcccaaactgtgtgtggccataataacctcatttgaagagagagactgctaccaaatgatgacatctgatcgacagtaagctgcatgatctttcacaatcatataacatcctttcaatccatcaactatgagttttgtacatttctgcatcgcagggtttcgctctcaacagcagactgtaaatgatctgcttagcctcaatgagagcaccacaattactctgctttgaaacacaataagctacagcaagttatagcagctgtactaattaagtaccaacagaaagcaagataacgtctctggcaagcataagatgtccagtttccttggaaacaaagcgaagagaagagggacagcagcagtcataagcaagcatgtgcattgagcttcctctttgcgagaaaatcactgccagattcgagggttttcgtacaacaggaggggaagtgctacagctaaaaagccccccacaaaacacatctttaacaacaacagggccgtatcatcatgatcatcaaacatacatccagctggaagaagaaaataagggggcaaaaaatagaattgaattacagattagcggggtatatagccatcctgtacttcctcgaggagatccaatcaactacgcgttctccagagcacattatcaatctatgctgtcaggtgcgcagcacagctgacatcaacatctaacatctctgaatgaaaggtgacctgctatgtggcgaaacttttttactcctcaaagccatccatcatcgggtgacctccttccgacgaggtgcttttcgatgattgtttccgagttgagccccgcctgttcttggctttctttgccttcatcctccgtttcttctcgttggcatcaacccaggtgtagtcagaaggtatttggaatggatcaacctcatctttccagttacggctatcaccactatcactggactgtgcaccacgcccccctctaacccacgaataccatgagcctgatccttctgattctttgcccttggcatcctggaattgcgttgggcttgagggtggggtagcaaactcatccaaaggttgtaattcctcaaactttgtgaatgtcacgatgactcgtattgttggaacaataggtatcgcaatctgaaaatcaatgttacagagagttagatatcatcttttccaaaatatagattaattcatgtgaatctcattttcgaagtaactgtagtgatgttaattttggtaaaagaagagatctgatttcaaatttgagactatgtgaaataataattatgatgcagtgcaaacgtcttgtactggcaccacaatgccttatccaacaagaactaagattcaaaacaaatgatgagattccaaaaaagttacaacaaaatgaaacgattcagattgctatgcacattgagacaagacatctgtaccaatttagaaacaataaagcatggcaacaaaacatggaaagcggtaaaaatagtctaataatgcaatggaaaaattactgcagcattcaccaaagaaaagatgacacatgaaataacatttgacaggaagagtggtcacaagatgtcgatggatcatcaactgcatttagggatacaaggtcagtagggtacaggggggcatcagttttatggtggtttggagtaggacccagctaatcaagactcaaacagaggaagagatagagtggatgaataggaaataaacatatgaaagttttgaaagcttcaatggatatatttttttggcatttcttaaatctgtgagattattaaattgatggtgggagcagaaacccactggctacttttaaagttaattaacaccacataaaagaaatggcaaacagacaaatagaaatatacaatatatttgtactagattcaataactcgatagtgttccatgtccatataaagtttaatacaacaaggaaaaaaaatgtcatcaaccatcatgcatcaaatccttagaaatagtcaatgatattttgcaagtacactgcacatttatcatttacacccaaatataatatctattattggaatctaattattccatatgggtggccaatagtagtggtaactaatagaaaaggtttggttattcgaacatccatcaatcatatgaattgtgcacatggcgggcaccacatcttatgataatgccttgttagtgcgagggattgattacccgggaggacacacataagatgtgctagttctagaacttgaacagaactatcttgtattaatatgtccggtctaaagggaaaaaaaccacatgcatagccataagccgcgcatcagcgccaacaataaagaaacacatattcataatttcatattcaagcacatgtcataaccaggttcaaacagtactatgcacaagcagcaaggcagacagcacaagtcccagctagggagtgaattacgacgcatgacacagcaggtggatcaaacaacaaacactggcagtcaaagaaaccagtgcaaaataattgctcatacaatcagcaaacagtcgttgattgagttacatagaatcatatcaccatttatgttgcaaatgaataagcgtgcaaattttgactaaaatgaatggcatatcaaaaattcagttaattgctgaaataggtggacattatatagtcaagttggcaggtggttaccttcaccggaaatgtgcctggaggcagtttagtagtcaagagttccctaagccttctgacagctttcactttgtttgctaagacatcaagcagagggatcagttcatccgtcttcaaagggaaatctggtgtcagccacaacactggtcttaaccccttcttgtattcactttcatgtttagtagaatcccctgatgatgcacccttcttcttcttgctgctgttcttctcctttccctttcctaggtcacctgattcatccttactcccttgattcgccttggatggtttctcgtcattcttggtgcctttcttgccaccccaaccaaaccatcccttcttatcttttgccacgccatttgcatccaaatgatcagccccgccatcaccttcctcgcacctctcctcaaattcttcttcctggttccccattctcaacgcagaatcaagctgtttcctctcttcggctgtcaacacttcatccagctccgcgtcaagttcagtgcccctcccattcttctcctccccctccatcgcaaacagctcctcatctgtcatcgcccccggcacacgccttgacttcacagtcaccagaacgtttaacatatcataaaccttagctttccaatgtccaacggcttccgtcctctcctgccggcgccaattcaaatgaggcacaagctctgcctgcgtcacgtcgatcccgggacgatacatgttcgtctttgacatcaacgccacctcatgtgcgacctcggcctccgttggttgcacccctgctccctccaatgcatctgtgatctccttgtccttatgagccagcactatgagagaacctgggtgcaactctttgcccccagcatcctcaggacgagcaccatccccgagaaacaagaaggtctggtccgaacgctggatgcggaagccgtcgaagccggcaagcgtcatgtcggcacgcagcgcagctccacgcttccaaatgcggtaagtgtcggagggggcgatgcggccgatgaagggtatgacggaggactcgaagtggaaggagatctccatgtagaagtctcggatgcggttgatggaggcgaggacgcgcgggaggcggcggcaccacttggcccaggcgaggggctggtagtggcgcgcgatgatggtggcgatggcgtcctcccgcgtgcagacggcctcctggagcgcggaccacccgtcggcgttctggagcgaccagtcggcgccggcggacatgaggatgtcggcggcgacggggtcgcggagccgcacggcgaggtggagcggggtctccctccgcggcacgtcgcggcggtcgatggcggcggagaccgcgtcggccacggcctcgccggcgatggactcctcctcggtggccacctccccggcgcgcgggaggcgcgggagccccgcgaccaggcggcggagcgaggcgtggtcccgccgcaccacggcgaggtgggccgggctgtgcgcgtacttggacgcgtcctccatgcccccaccccgtcgctcggcgctaggtcagggcggatctaggccgagctgggcggcatgtggcccagatctggctcgccgaggtcggcctcgggatccgccccctcctcccgcggcggcggtgacgacggcgcgggggggagaagggagggaggggaatcgcggcgcggcggagggagactggagaggagggaggggggaagtggtcctcctgttcgcgcgatgtctcgctgtatttttcttttttctcctctctctgtgtctgcgtctcgccctcctgctgtatcgagactttgcctgcgtgtgctctagattggcgcctccttccctccctccactgtgtgtttgtgtgggtgatcttgggggggtttggtttggtttggtggtgtcatgggctcgggtgatcatttcatggtcgccaggacagtttgttttgtgagctaagtaagttgcggttgatgatgttttctcttggtgcaaacatcattggttaaatggttaggtaagtaacgggtgtgattttcttttgagaaacacagtacaatcgttggtgcttataacacacgcatacgcatacgcataccctgtctctatgagtatatccacgaggctgggccggtatatcttaaaattgatgaaaccagggtttgaaatttcggttcgaaatttctgaaattttggtaacttcgccccaccccccccccccccccccggcaagctcacatcttgcccgaaattttcagttttttgtaatttttttttaatttgatcaggttttattcaaattaattcaaaatcaatcaaattttcaaataatttcggcaaacaaatttctaaaattccggtccccaccggcaacaaaaccaattccaaaatttcaaagcttgtatgaaacaccacgggtgtctcgctgtcaaggggtacgtcgcctaccactaaataaataattaacagtaaaatacgaccatccgtatcaagtttatgacttaagcccatgtgggttagttccaccacaataaacctaaccagttgagctacgctaaacgcaatacaaacgcaaacaattgctatatccttcttaaatatacttcctccgtctcaggaatatagtaaccagaaactagattggacatcacatagatacattgtgttatatggtgtttaatctagttctaatttgctatattctaaaacggaggaattatctaactaatacatgatatgtcgcatctgatagctatattttacgatggagccagtatatgctcgtcacccttatcaattgtatgcatatgcgctcttataagcaacttcgaacgattgagactaatagacttgaaattaacgaagtcactatatcacacgttgcctggcaccaaaagaaaatcagaaacttgaacttatgagttagtgtagctagtgctgtgatattgtgtacatgtgggacgcatttttgtattggggggctataactaaaaagagggaaagaatgctggtcacttgtctaaattaatgtcacttatccattaattgctattccctctttaaacttgaataaggtccccatgagccatgacataacaccccacttgtgtaagattaatgtcatcaatggatgacactatgcccattgtcgttgcatcactttaaagctttgttgaacaaccctgacaacgtccttttccgtgagatttacacacggccgaccaagacacacgtacggcatatagctgcaggacgaatttgtaacggttaaatatccttaataatccatacccgcattagctacgatatatccatcgaatctaatgatcgatctcctcctcctcgtgaagaaagaaaaagaagaagaaaaagaaaaaaaaacaaactactctctccatcctaaaatataaaaacctaggactggatggaacattttctagtacagtgaatttgaatgggtaggaaatatctcatccagtgttaggttcttacattttaggactgatgaaacacctcttaataattgataaaaacggtttatatctcctgtctttattactgacacagccaaataaagcaacctggctaatgtgatcatcgctagtacaatagcactccctccgtttcaaaatgtttgacaccgttgactttttagcacatgtttgaccgttcatcttattcaaaacaatttgtgaaatatgtaaaactatatgtgtacatgaaagtatatttaacaataaatcaaatgatatgaaaaaaataaataattacttaaattttttgaataagatgaatggtcaaacacgtattaaaaagtcatcggtatcaaatattttgaaacgaagggagtactagtatttacagtaactagcagtgattaatctgtagaccatgcaactaatcaacccataataagagaggctgccctgccctgaccaaaacggtgtaaaagtcattggttgttgtgttgtttggcagttcggtgccgtgttgacgcagacaagtttgcgcggtagttggttgcaattgcaattagcctactgctacttgatgacaaatagtagaactgaatggtcgtgtcaaacatacagatcaaccaggcaattaatcgacaattcgccattggtcaccgagatgagcagagcagctgagccggcaaggcacaagcatatgcaacggctgcaggaggaggaaatctaatggttggtgagagatatgggcagcacagtgttctctgtacctgcagattcacactagatcggatgcttctgtctctgacaaatctcgctactgctcagcccaagtaggccccctgatctctcgtggctgcagggcacagctgtgaaacatggcgccattagctagctcaaatcttgttgttactgtgccaatccagatcacgtacgagtacactgtttgctataattctacaattaaagagatatactccctccgtcccaaaaaaaaaaaagacaaaccctggttttcgtgtccaacgtttgaccgtccgtcttatttaaaaaaaatatgaaaaaaattaaaaagacaagtcacgcataaaatatttatcatgttttatcatctaacaacaataaaaatatgaattataaaaaaatttcatataagacggacagtcaaagttggacatgaaaacccagggtttgtcttttttttagacggagggagtataattttactgctctgaagtctgaactcgcttctagcttgaggctgaggaagagcagctctctactaaattcagcaagtagaaagattcagaataatgttgttacagtctctaactacactgatcatatcctgcgatagcttcatggaggataatcctatgcagaaacaaatctcgtcgatcgagcgacagttgatccaatccatccatcgagagtttcagatgtcctacagttcacgcacagaagcattcttgttgctggccggcttgctgagatctcatttcagaatgggcaaagcagcaaagatgcatagctaacaggctaccactagcacatataaataagatcggtgacagactgacagtgtgtgtgtgcatccatggagtcatggaccccaatggcatccatggcgattggtcccctgatcaagcaagctgcagcttctctcttctctcttctcctctcaattctcatctcagctcatgtgatcttgccttctcacaaagcgatatctctccctcctccctccatgataagcatgcatgcagcccagcttaattattttcttgcagcggctgcttattagctagagcaaaggattaggacagcaaatagtaactgtgagcgaccaaaagcagatggtttgtttagctagctcgatgggcatgcatctgtactaaacaaataacaatgaggtgtagttgtctgacctaagttaatgataattttagcaagcatcttaatttaaacactgcagcataatgccagcatctctatgtcactctgtgtgtgtctggaaaggttgatgcctgtcagttttgctagtgacctatcgtgtgatgataattaggattgataaagttatgtcgcttttgacgccgaatagcagcttatgtggcgattatgtgcagccctagagcagtattaagggtgtgttcgctactcaccctattcacggaaaacataacaatccattaacatgtgattaattaagcattaattattttttttcaaaaatggattaatttaattttttaaacaactttcatatagaaactttttcaaaaaaaatataccgtttaacagttttaaaagcgtgcgcgcggaaaacgagggagaggggttgggacaacttatattcttttgttttccatatttttcaaaataagtactacctccatcccaaaatatagcaatttttagctaaaaatgcttatattttgagacggagggggtatgtttttataaaaaaaataaaaaagttgctctaagaaaaaaatatttttaaccaaactattaaacggtgtgttttctgttaaaatacatacaaaagttgcttaaattttacattgatttatttttaagttttttactaatacttaattgatcacgcgttaacgaggtttctagtcccaaacaaacacaacattaccgctggcttgctaacaaagtttattttttggacacaactacaccgagagtactagcaggatagtgctaaagagagacactattctttccaaaagaagctaccagtacactcaatatctatgtttttttttctttttagagaagtttctcttaaaatacttatctgatttatgatccgattataccgttgtgttcgttgcaattaaatctttacaacaaaatcttacatgattatattctgataatatacatacatatatatatatatatatatatatatatatatatatatatatatatatatatatatatatgttgtaagttacttttattatatatgtaagttacttttgtcatatatgtgatttaagctctttaataacttatatattttaaatcacgtattgtttttagtatctatttgcgtcattatgctctacataaaatatgtgacaatacaagatccatattgatatatattcaaatattttattaatttaaaagcaatgtatttaaattgcagaagtgatttagttatacaatagaagtaacttagctatacaatagaagtaacttagctatgcaatagaaataagtttctgtagtagaagtaattatatgcaacagaattaatttagttatgtaatagaagtacttctaactctctctatagtagaaataataatttacataaatcataaaagtaacttagcataaaatgcaagtaaattgttataacattagaagtaaattcgttgtaggaaagaaaatatggtctatcgaaaaattaaatttaaagtccacaaattacagaatttactaaaaacaataatacaaataatcaatttagagcattatgaatgtataagaagtaacttagtcaaatctaaaagtaatttatatatatgataaaagtaacttacatatataataaaagtaatttacaaacataaatatttttttcgtcgcaatataatcatgtaagatcttgttgtaaagatttaattgtaatgaatacaatggtgtaatcggattgtatatcggataagtaattttagagaaaattttataagaagggtaaaaagaaattttatatagatgtgtaggcatttgtctgttgtctcccgtacagatgtgtaggctttctctgctatgtacgtagactttctataccgtctcctattaagactaaacagagactaaacagagaggcctctctgtttagattttaccttattttttatagttccatacctcattggatgcttcccaacttcgactagtgttcggggctcaagacctaagcgaatatccccgaaaaaaaaaaggaaatacgaatatgtccgtattgggccagcccataagtacggatgttacatttccccgtctcatgggccacttcggggcccacatcgtaccaggtgaaatgaagataatggaacacaaaatactgtatatactttttaacaaattgatccttttcaaaaacttatttcgaaactagtccctgcaaaaaacttcaatcaaaaataggccgcggactcagcgccatggacattggcgctaagctataacgtatcagcgccaacatcgttggcgctaaactctaatccgaggtgacatgaattcgctgagtcatcagatcttagcgccaaggtatttggcgctcaggtttagacgatttaaatagatgcggaggcatttatagtaacaccccattgatagcataatggtagtagagttctactctatccttgaagagcagggtttgactcccatctctctttttttttctttccttttagtttccctttttcttctctccctcactcattattaatatttttttcttttttatctcgttttctttttcttttttttccttttagttttccctttttcttctctccctcactcttccttatagtttccctttttcttctctccctcactcattattaatatttttttctttttttatctcgttttctttttcttttttttccttttagttttccctttttcttctctccctcactctttattaatatattttttctttttttatctcgttttctttttctatgtttatttatttattttcttttttttcttgtaatactatcttcaaaatatatgtttaatatgcaactttttttgaatttgaaaaaaaatattaaagtgctatattatatggaaaatgagaacttaaactgaaatttcaaatcaaattcaaaataaaacaaatttacaaacggaacagtcattttgtaaagaataagagtgagtattaatatgttttttcttttttttatctcgttttctttttctatctttatttatttattttcttttttttgtcttgtaatactatcttcaaaatatatgtttaatatgaaactttttttaatttaaaaaaatattaaagtgctatattatatggcaaatgagaacttaaactgaaatttcaaatcaaattcaaaataaaacaaatttacaaacggaacagtcattttgtaaagagagtgagtagtgaagagaacaaaacttattaaagagagtgagtagtgaagagaacaaaacttattttgtaaaatacatgagggaaaccaggattcgatcctagtaccctatggatgacagcccaagcatccaaccaccacgctatcacggtcttggttctatatgttgcttgcgcgattatttaaaccgtctggacctcagtgccaaataccttggcgctaagatctgatgactcagcgaattcatatcaccacggattatagtttagcgccaatgtccatggcgctgagtccatggcctatttttgattaaagttttttgcagagactagtttcaaaataagtttttaaaaatgaccaatttataaaaaaatcggctaaattactgtagtactacttgggtgacgctcgatcccaatacgagtatttataagatgattttaaagctactccacaagtagataggagtaataaataaaaaaacactttgattaacatcactatatgatttatttttcacagtttcggaagacaaattaattatctttgcacagtttcgctgcaccaccacccgattctatgttcagacaaaggatatcaccaaataaaaaaactaaacccataaatgcatagtagaatccaaacaatactatatattcgcatcagaccgacatagtacgttggacaaaaaaaaaagagtaaaatctatacgatgttatcccgtttgaacgaaatgataccttaaaaatatcgtatgatatctggtaagtatcatcttatctgaacaggtatcaactgatacctatcaaaaatcaagtgcctaggtgatatcttagaggtatcattcaatccgaacgagatatcgttctacattacttccaccgtttcaggttataagacgttttaagtatgatcaaagtcaaatcatttcaactttgactaagtttatagacaaatataataatgttgataatactaaataagtttcatcaaatcaataattaaatatagtattttcataataaatttgttactatttttttctacaaagttgatcaaactattttaattttgaccaaagttaaaacatcttaatctgaaatggagggagcatttttcttaagaaggaaacaaagaaaagttaccatataaaattgtttcagaattcaattttgatgcatggtttcccccattttgcatcgaccgaaaatctcgtgatttcgcggcgggcggtacacggcgcggtgcggtctccctctcgtccagcttcaaaacaaacacacttaccgttacgactccaacggctacttccctttcaaatccttccccttcccaagtcccagccctctcctctcctctctctcttcacccgcaactcgatctccaattctctctctctttctctcgcatcgaatccgagttcacatctccaaaccctagcgagctctctctctcgcagatggcgccgccgacgccctctccccggccggggccgccgccgacgccgcaggcggccatgacgaccccgctcaagacgcccgcatccaagcaccgcctccacttcccggccatgacgcccaggaacggcggcggcgggggcgccgcggcgggcggcacggagcacccggtggaggtgatcggccgcatccggaacctcgccgcgggggcgggcggcgcgtcggcgctggagatcgcgggcgggggcacggccgtgcgcgtccgcggcgacgccggcgggtgccgcgacttcaccctcgacggggtctcggtctccgaggaggaggatctggaggggttctaccgccgcttcgtgcggtcgcggatcgagggggtgcgggtgggcgccaagtgcaccgtcatggtgtacggccccacgggctccgggaagagccacaccatgttcggctgcgccaagcagcccgggatcgtgtaccgcgctctccgggatatactggaaggaggaggaggaggagggggaggtgtctctggtggtgggggtgaaggcgatggccgtggcgaggatgacgccgggttcgggatggggctgttcgtgcaggttgccgtgctcgagatctacaacgaggagatctacgatttgctcgtggggagcggagcgaatgctaaaggaaacgcccccaaggtgatacaccgaaactaattttccacatgccattattaactgttagtaatgcagctgcaatttgcaattgggttcatatgtgatgatgcctagtgcttaggaaatgttattaattaagatagatgtgtgttgaagtttgaaagttaacaggtggtgtctgctttcttactgtcactgtccttttcagtgaatcttgcttgtcagttatgaatctgacattttttttaggagcggataattactttaagctgaattaagttgttttctggtgctcggattgcagcattttagggataaacaaatggtaatatgaaattggaagctgaaatacttactgtgagctgaaacaggttgttttttgagtggataattactgtaagcttaaataggaagctcatggcttgtaagttccaaggattggcatacttatcataggttttaacatgattttcgggaacatatgatggacagaagattttaatagttttaactgcgtaactttggaaattttctatggtgttgaagtttctcagtccttactccttactttatgtgcaggcgaggctagaagtaatggggaagaaagccaagaatgcaacctacatatctggaaatgaagccgggaagatatcaagagaagttgcaaaagtggaaaagaggcgtattgtcaagagcacgctttgtaatgagaggagttcccggagccactgcatggttagttgcacacttgcgttctcgtattgagctgttagctcctggaatcttcatttcaaaaatgaactcgctattgataagcttcgctttacttctctagataattttggatgttccatcggtggggggaaggctcatgcttgtggatatggctggttctgagaacatagaagcagcaggccaaactggatttgaagccaaaatgcaggtctgtgatgtcactaatgcctgtataattttgtactttcagcaggacgtttttaaagttaccccttcaacaatgaatacctaatacagaagaataattaacactgttgtgtaatgaaaaatctaaacataacagttaacggtctgcaaagcagtgaccacattgtaggttttttttctccctttttttgaatgataaagtgatattatcacagtcacgctgtttttaagtactttaggtactactattatattgtttttctgcaacttattgtatgtgtttgataattaagttcatagtttgtttacatgatcattactgttgaacagactgcaaagattagctactagtactttttttcctgcaaattatgttatgtgttcgataacagaagttcatattttgtttacattattattactgttgaacagactgcaaagattaaccaagggaacacggctttgaaacgagtggttgagtccattgctaatggtgactcccatgttccatttcgagacagcaagctcacaatgctcttgcaggtacaagattctaaaatttcacattcctcgatacaaatttatactgtaaaattaaagctgctaacgtaatgcctacgatcttccatgaattttcaggattcatttgaggatgacaaatcaaaaatcttgatgattctctgtgcaagtcctgacccaaaggaattgcacaagacagtttctacattggagtatggtgctaaagcgaagtgcattatccgtgctgcccacgctgcaaccccaagggacaaaatgagctctgaagagtcatctacaatgctcaattcaagaattgtcgcgatgaatcagttcatctacaatctccagaaagagaacaagctaagggagaaagagcgcaatgaggcccagagtgtgctaaggaaaaaggaagaggagcttgcacagctcagggcgaagctcaagctgattgaaggtcagggagcagctgcaaaggaggaagagattaactcaaaggtcatggagaagacccagagtttgaggactgagctcatgaagatggaagagaaaatgcttaggcagcagcaagaactccttgctttgcaacagcggctgaaggaggttgagcgtgaaaagcctgtgcagcaggatatcatcggaggtagattgctggcacgtctgtcagagatgtccgctagggcggatcagtccatgtcaatggatatgtccattgattttgatatgggagatcagccagctgcgcaagacgtgaaggtgatcaaggaggatactcgcaagcagggccagatatggagccaagcaaatactgcaggctcttgcaccagcgctgtggagcaagaagatgatgttgtgaggctgtctgggtacccagaaaaggtggtcctgagcactgtctttgaggagggagatgaagaagaagataaagacagtggcgttgaagaggaagtgtgcaaggaagttgtcgaagagagctatgtaatgcaacagccccttgcagagcctgaagaccctgccacaaggaataaccggattcagaacattttcaggctttgtgggaatcaccgagaattagccaagaaggtccagtcaccagcaaagaaggcgttcggagatgagaacaatgagcctgcgaagcaaacattcggagatgagaacaagcagcagcctgcgaagcgagtgtttggagatgagaacaaggacccttcagcatggggagcgatagaacctccaatgtgcgacgtcagagtgaccgacagtccagtatcctcgcagctttcacctatcgtctgccaagttgtggacgatgccaagttgcccgtgtcggagcagctgaaatcatgcaatgctttggaggcagctgatgagaacaaggagaacaatgcttctggacaagacggcctgcttgaagtctacatcaaatgggagtccggccatctgataaaaggtctgaaattgctgagcaactcgtgtctttctgacctgagaaagctcttggaggatcacttcgaagaagcagggagcaagcagcagcagcagttcaccttcctccttctcggggtacgtcatctagctcctctactactacctatgccatgctttcatccaagtgttctctgctacctcttcctccttgcaatgtcattcatccactatcacatcttgcattggaggatcgaatcttgtcagtgaaaacaaataaggagaaatatgtggggatctctgatttggtgcaggatccttctggcgcaccggtgtccagagagaaggaagcaggggtgccgataagcaagctgccaagctgcaacaaccagccgaacagctacctagcctgcttgcgcgctgtcaagaagcagccggcgacggagcagatgccgttcagcccactggagagcaagctcaattcggcactgaacgacgtgcacctcgccgccctctcgccgaaggtcaacccaatgagccctaactacatccgtgagctcagagcttgagctcttccaacctgaagaagatcggttagatctttcgtaggtttgtcgccggtggcatttcaacggtggcaacgatgtatcatcatttatctatagtctggctctgttctgtctgtaaatttgctagctataggctggttctgcaaacctaaactctgaagtgtaaccatgttacacgagtggctgtggctagacactgcgggtcatgcgtctgtggccaacaaggtgaatatgaatatgattcgattcgtttacttctgctgtgctgctgttctgtctattgcttggtcactagtacatttctatattactccctccgtacttaaaaaaaaactccagattcatagtcctacccctcctagattcataatcgtgctacgacgtgatacatcatagtacaatgaatctggacataatctattaacagtattcgattcattgtattaggatgtgagtatgtctgtattaccattttagacctgtttgaatctcagcttgatttagcttttcaatgacatataaaacaagaaaaaccattagttcattaataattgagtattagttattacaaactttaaaaatatgtttatttgatttttcgaataaactttgataaaaaaaactttttataaaaaacatcatcatttaacacagtggcggatacagcactaaaatttagctatggcggatcatcacacaaggacgaagtgcgtggtattttaaaaatgatgtaacattttattatacacaaactataatatgttcgtacttattagaatatatgccattaacgatgattataatcctaaatttgtcatgaagtttttacaactgaagccttaaatttgttgtgtaacttttatgactaaaccacatttctacgagtgttaaatttgttgtgtaacttttatgactaaaccacatttctacgagtgttttcctgttttttaggtgtgtttatttataagtagacattcacttaagttacatatctattttttagcattcgatttttaccgattaacattttgtggttagctagactattcattcatttgtgcagacacaaggcagtccccctataggtctttaccaccagttaactaaacgaataagcttgtaccaaatgaaatacagccaactaatcatataattagcatctgaaatcaaggctgagatggtcatatgcttgaataccctacctactttgtaggtatggccggcgccatcccttgccacaagagaaggtccgccactgatttaacagtttaaaaaacgtgctaacgaaaaatgagaaatttggagtttacactaaaaaaaactacactgtgcatagtttgtgtaaattcaaaactgaaaatttaggtggagctgttcgttgttactcccaggcccataagtgagaaatgggccagggcccagggatggagtcggcccaaggcccagtagtcgtgtttggtgggcagtcgcgtgagaaaatgagaagatacaagtgcacggaggctctgacgcggcggagacacagccaagggaaaagagttcccacttcccccaccaaactccgctcggatcacccaccggcggcgaggctgcggagatggccggcggcgaggacgaagggtggaggaggagcggcatcgaggtgagcgcactgcagttcgactacgacgggcagccgccgctcttcgcgcggttcaatctccgcatcgcccccggctcacgatgcctcctcatcggcgcgaacggatcaggttaggttttgtttgcctaaccctaacccctcccatcagccgtggttcctacgtagtttcgtcgatttccactattcgatgctccgggcgagctcttctgatggattcgcgtggattggtggctttagctataatatataggctatcttcactccgcgtgtcgtttggattagaattagatatagattgatctatggttcctctattcgtattttgaagcaattcgcgtgtattactgtatttgtttgctagttgcaatacgggtttctagtgtgccctttcgaatttgaatgaccatgaatttgtgtatggtgtcacccttgatgttttggagttccgcattctgacgtttcagccttcttcaaggcaaggttgttctgcactagtgcttgagcaaagttggagctaaagcacaatctcaatggaatgcttgtagatactaaggtgaataggtgatagggggaaaaatggagttcaaacgagttatactttttattatatactcaagttgtcattgatagttgtgaggcacctatacattgctcttgcaaatgcgaataagggtgctctttatcaaaagaaattctctcctttttaaatcaatcactgcacaatcatgtacagtgcctgtaattgaggcatgttatgttcttatcttctgtaatctatcatgcacatgcacacctatataatgtaccaacttgtgccaaaccacaggcaagaccactctcttgaagattcttgcggggaaacatatggttggaggaagagatgttgtccgtgttcttaatggttctgcttttcatgacacacagcttgtgtgcaacggtgacctttcctacttaggtggttcatggagtcgggctatcggttcagctgtaagttttcctttctgtttactttctataagaaatagaaattagttcatcattgatttatatttcttcatgatcaatgtttgtacaagtgcatttcttgctaacgtgctttttccaagaaattcatggaagccattccctacttttcaccaatgttagctgaatagttatttgtaactttggttcattctgttttactttcttagattttaggggtctttgactctgaaatggtttatgtgctgtccaaaataattattagaagattcatgtttacttaattgatttttttattacatatgtgtggagtttgataacagtaaatggcatgacaatagtagactacacattgacaattcattcttgcgtttgcctggtttctcagtgcaatttatatgcatataacacccatgtaactttctcagggtgacgttcctctgcaaggcgacttctctgctgaacacatgatttttggaggtactgtatgcacaataatgctcctcatatcccattgtcattcttgggttcttatgggatgaaagcaatgatgtgcctcacatactcagtggtccttgaattatttgaaaaccctggaggtttcaatcctttctttcagttaactttctgcttgcatgtttctttcttctttttttgtttaaatagatgctgctcctagatttgttattcagtttagtcaagcttaattaatgaagtcaaccttactatagtaaaaatgcttttagcagttcatgctggtgtggtagatgtaagcatgccttttctttctctaccctgaaacatgagcagttgatggggttgatcctgttaggcgagagaagcttgttgatctactagatattgatctgcaatggcgcatgcataaagtctcagatggacaacgccgcagggtacaaatctgcatgggtcttcttcatccatacaaggtgataccgtgttcctagttttctgttgtttcttttatttcatatgtagcaccctaagagtgactcacagacataataactcttgagtgctccatcatacatttgtagtacgccatagttattggctcattgctgggctgagtgctccctgatatgataatggtattgtgcccccaaaagggtaatagcattattgcctagactattctgagaattcacccaacacatcattttagtttaaagatagaaaaactaccttatgtttggctagaggtattctcatggttaaatttgtgttagtgtagtgccaaagactgctatgaaactatgacacctgagatcaatacaggtactcttgcttgatgaaatcaccgttgatcttgatgttgtgactagaatggatctccttgacttctttaaggaagagtgtgaacaggtacagtttttgttctttctatctcttctgtctgttatgcttctcattgcataacatggaaggtttcggcactgcagagagaagcaaccattgtctatgccactcatatatttgatggattggaatcatgggctactgacattgcatacatccaagaaggtgaattgagaaaatcagcaaaatactctgacgttgaggagctaaagagtgccaaaaacttgctgtcagttgtcgagtcatggctgcgatctgagaccaaactccctaagaaagaacatccccgtcctgagacccagcccaggcgctcctctccatttgatgcttcaccgttccgatcttcacgccacatggcctactaccgttgatgattgttcccacctctacacctattctggtgctaattaatcatacttccacaatttgtttctgttctgtttctcatccctttctacggcattgtacctaatatataaataaagcgaacttacccttgtgccgatgagcagtgagtacccatcaagttcatttctgtacttctttctgataatctaatactacatgaattcagtccctgtcattctttagaaaggcttgatgtacattaagaaatggccccatttatcacgagaaagtaatgtgtacctgtcttctcaagtactagcaacttcactgcttatatgaatatataaaacagcttaggaggcttgtacgagctgatcaggtatggtaaccttttctcctttgctatctggtcaactttggctaccagctattgctttaattgttgctttcctttgcatgtagtattgcattacattacatgtgcactcctggaaggaagccgcatgataagcatcaacttgtggaggatgacaggatgcggtatctctggctgtgacccattgctcggtctcttgccacttgccaggttctcaggtttgcacattcttatttgttaatctaatccgtaatgtgttccagatgatcatttggacactatgcagtcagtaggcaggcattgtcttttatcaacatgcttatgttggcaatcatgtctgatccccgtatagctaactgctctcaggccatgctgtctagtagtgtctaccattgactcattagtgataatcatcactgggttggtaatcaaacctgtgcagacaattccagcatatgcaccagcatttctgaattttctgtgaccctgtacttacgtactaagctcgtgtacagatagatgcattctcccctcgctggttaactcgaaactattaatacgtgatgcctgcttgagtcgagtacatgagccgtacgggattttgcaaggattgaatctatataaagttcagaagttacctaattccaacgtgggacttaatatttctggagtttgagctccgtggtacacagacctgttccaagttcaaacttcaattccctggtcgtcggaccaggtaacccacgtttagtgaattttttttcagaagatggatagattcatttgtgcatcgataactgaggcttgttaattactccatgtcaaagtatctgattatatatttttatcaaagcgtcacgaggaaaatatgtttggaatcgttggcgtgtgacttgtttcgtttcggtaaaaaagaaaaaaaaaggcgacgagaagaacgagtttggcatggaagggaagcaaccgtgaaaatgccgtactccgccatacgatcgccgcgtccgtcagcggtcaactgtcgcgcagcaccgtccattccaaagaggccagtaggcggatggacggcccagatcagccgtactccacccaggcgccagctttgctcctccacgtccgtaacctgtcgctatctcagccgtcggacacggaggatcaacggccgagatgggccgctatccgcgtagttattcccgtgcggagtcgctggggggaaaggggggggggggggggggccaagacgtgtcggcctctacctaccgtagcggggcccaccacgagacagcgttttatccggtaaaaaggctgggaaaaaaagatacactgctctgctacttgcaacattggcctccctcttctctctcttttattttttttcctttttcaagtcgctttttataaaattggccatctttaattattggccacgtcatttcggctggttttcctgtctagtcagggtcgagggctcgatggacggtagcattatccgcacgcaaaatgcccctaagctatctcaacttttgtgtttatgggaagtggaaaagatgtgggattctttttcagcacgatgtgaattgggaacagcctttgtggtactacttccttttaaaatagaaaaatttaggttgttttaagaaatattttttaatcgtctcgttagttcaaatttgaattttgtattctcttctcaagcttctgattagtttgaaatacttatattttaatgttctataaatgctaaatattttggtacaaagtttaaattctcaaaataattatattttaaaacagagtaaatagtagaaagatttccgggcccataactaaatgaaaggttttatatttttttagattggctgtaaaattattatgtgatgggaggatggcatattgttgttttgaacgatgtggtgagattgggtagtaggaatggaatgatcctgcaaataccataagatgaagacacaattgtgcacaatcattgatcatgttcatttcatattataaatcggattatttattttacgcttcggaaaatatgcttccttaaaaaactttcttctactgtattatttatttagatcacctattttaaattatctatcaaatttattttttaaaaaaatatttagtttatctctatagtcaagtagataatccgagacaataattcacttagtaatctaaattaaaatggtccatcatctccgccatgagtttcactcttcaaatatggcgagttccatcacaatcaatcatgccataacttcttgtattttattaggagttgttgcccctagacaattttttctctactattcgtaaaatctgatcccgtccttgatacattgacatgagcactctcatcgccagtttcatcaattacagagagtccttaccatgctcgtgattgcatcgtcgtcaccaaaatggcttatccgcctacgtatgtacaaggtcgacactataaggacatgttttcatccgcctatgacatggccaccatctatctcggtgctagggttctagacattggtcctactccagaaccactgaaggcataggcggaaaaaaaaagacaatgtccgtgagcataacatccaaccaaccaaaaggaatgatgtcgtttagcggagcaattaaaacgagtcaaacaaaacagttatagaataaatattatatgacgtggaaccagatcatgtcgtatcccattttgagatctatacgcacgtcaacccttatcctaagaatgccctatcctacctttagaagccacctaaatactcatatgataacatatttacacgcgcgagtttcaattctcaccgtacaaggcattcgaaggagtaggatattatgattttgatttgtttagagacacaaatgcactccttttatcaaaagtgcaaaatagatagagttcaagtataatactctataagtttcgtaaaaaaaagattcccatacttttaatgtttttaatgctacaatcaaaagatagtaattcaaatcacaaattgctatgtcacaaacatagaacaattatccttttgagtcgggtttgtgctaccgctactgcactctcaattccatccttagtattatgatatatacacaacaacatattttgtaggccatatagaaaatcctcggtagctcctagctccgtcataaacttatataaagcagtatcatttagtataacacgaaatcatcataagataattttgaaaggaaggtaattatcacaagatgctacgctattaactcgtgtttctgaacttatttttcccatatatcataatcaaaatgagaaggaacacaagcattagtttttgttaccacgaaaagccccgaacgtgtacatcacttccttgttttaagagcacaacaagcatggtacgttcaaccactactacaagtctacaactaaagatactccccttgtttgaagcaactatttttgaccctcccctttcttttaaagctaaacaatttgttggtgttttgttttgaggcattgtaaggaaaaggggaccaaacaaactgctgctactatatgcgtactacacccatcaccataacaaacaagaaacaataaagtgccagaaaaagagagaaaagaagaaggaaaagaaaagagcaacaaaccaagatggccgcacctgtcaattacttgtaaaaacgaaaaaaaaaaacaaacaacctgctcccagttaatcagtttctttaatcgggtggtgtctatttactaatcgtcccctctccttcactctttttctcttgctggtctccgtcttcgtcttctcctcctccaccctctctctctctctctctctctctctctctcctcccctttgttccgccgcttcccctctctctctacctctcgcggcgaattcgccgagagggcgcagggaattttattaggagaaatcccctttttgtatccgtttctccggatccgcacacctcctgttaatccgccgattcttctttgatttgttcatattcgttttttttatttttttccctttgtttgcctttttattcgttcgattgtggggggagggaagagtttggtcgaccggatttcttggtggtttgcctggatctggcgtcctagaggccctcgtgcccgaatcccgattcgattcgcctcggcgcggcgccgctcgcctcgacgggtttggatctcggggtgggattagaggggaaagggggggggggggcagttgattcgtttggttgagaccatcggagcagcaaggagatggatcatgtagtcgggggcaagttcaagcttggaaagaagatcgggagtggatccttcggggagctcttccttggtcagtagtctatatctttctcatgtttatcttttctgaagaacatgttattattatgtttggaaatggaagatgctcactttgttgatgttttcttttttgtttgcagctgttaatgtgcagactggagaggaagtcgccgtcaaattggtattggattctgtcctccattttcgatgcacctagaagagttctttttctttgggggaagaataatttgataaaatttcttatttaccgtgagatcatgggatgggaatgaacagtgtagtaaaatgtttgtgtcgaatgttggtcctttggtactattttggtactattgggaatttggttatagtgaaacctttcagacattggtgttgctgacctgtttgctttggtctcacaggaaaatgttaagacgaagcacccacagcttcattatgagtcgaagctgtacatgcttctgcagggaggaagtaagtttgcgcctagagcctgttagcgtatccgttttgttgaaatgttactttgttatcgccttctatgactgttatgattgagttgaccttccttttttcttggctaaagctggtattccgcacttgaagtggtttggcgtggagggagagtacaatgtgatggtgatcgatcttcttgggccaagccttgaggacctattcaactattgcagtaggaaattctcgttaaagactgtcctcatgcttgctgatcagatggtgaggacactgatgctttattttcaaatttcctcaatccatatattctaatttgttaatcgttgtagaatcaaactggtatctgtatcttgccctatatagattcctgacgtaacaccatttgttcgttatccagatcaatcgagttgagtacatgcatcagaagggatttcttcaccgtgatatcaagcctgataatttccttatggggcttggtaggaaagccaatcaggtttgcgttcctacctggctattaccattttgtgtttctgcatgtttaaccacatcaatagtttcatggtattccatttgatacagtggtgccctaacgccttaaatttttcgtaacttggtgctcttcattgctatgaaggtccaaaaagatgttccagtagaatgatatggcttgggttttaagggcctgttcactttgatgccattttcaaccttaccaaattttggtaaagttaccaaaaaagtagctacatttagttttctaccaaattttgataactatataagaaatcctaccaaaattttggcaagttaccaaaattttggccaaaatttggtaaggtttttttggcatcaaagtgaacaggccctaaattaatgctctgatatctggtgaatttagttaaaatacaactgtggtctgttaataataattgtagataacttgtgggatagaaagaaacaagatttggttagcaaatcttgaatccagttaattttgactatttttgaccttgtttcaggtatatataatagattatgggcttgcgaagaaatatagggaccttcagactcacaagcacatcccatacaggttggtgtacaactttaaattacgcctatgcctactgcatatgctgttgttttatttgttatccagcacaaaattgtataatgttataaggacattggcaaatatctcaatgcacttctcttttcaccttttttatgttgatgtcatgttcattatgcagagagaacaagaacctcactggaacagctcggtatgcaagtgtcaatacccatcttggtgttggtgagtttactgtgtcttctagctgatggagtacatttgataagagcttttgcctaatttaagttttatgttcatacagagcaaagcagaagagatgatctagaatctcttggttatgtccttatgtacttccttagaggcaggttggtttgtgatattcagcattgcagacatctggttttcttgtaatgtttttgacatcattttctgtaaacaatgctaaatatttgctatcattcaacttccaacagcctaccatggcaggggctgaaagcaggcactaagaagcagaagtacgacaaaataagtgagaaaaagatgcttactcctgtggaggtaattcatgatatatacttttggtatctgctcttgtttttttcaaagatcaaactgcatcaaactgacacttttatattgttttttgagctaggttctttgcaaatcttacccatcagaattcatttcttacttccactactgccgttcattgaggtttgaagacaagccagattattcttacttaaagaggctattccgtgatctctttatccgggagggtatgttctcttaaacataaatccttacctcatgatcataaattgtacttctttccatcttccctcagtgttttttttaaactgaggataagttctgcacatttctaatggcatcattgatacaggatatcaatttgattatgtatttgactggaccattttgaaatatccccagataggctccaaaccactgatgagggtatgcattctgctgttataattattggacaatgctctcctgtttgatacacttgatttgactttgttcttcttgttgattcagccaagtgaaagaaccagtggagctgcgggaccttctatggagaagatggaaaaggccccaggtctgttcttccacccatgaaagacgcctaacaaaactataatacaaacaatacagcccgtaagaacatcttattttaagcaggtgaagcatctggcagaaggaatcctactggttctttgaatcagagtgacaattatgcacaacggccgtcaatgtcactaaaggaaatcgtaagttgaatccgtccccgcatgaacttgagataggagtccagttcctatgctgtataatgtcttccccttgtgtatctctcctacgtgtaatttgacgatcatgaaatggttcaccttctcagatgcatagcaccgaccggtccggcgaaaggaccgtggaaagaccccgtacatcctcccgtacaggcagtgcatcaaggagagcggttgcgtcaagcagcaggccaggttcatcggtggaaccaatggagcagcaatacagccggacaagcaggttgttctcaagcagtggaagccgtccttccagcacgcagagggttaatccatcggttggagagacaagggccacttctctctcacgagcagccgttgcaagagggtcccgcgacgagcctctccaccgcagcctggagctgctgtcccttggtggcggtaagaggaaataatatggcaagagaaagaggaatctccacaacggaaagagaaaggaagaaacgctgtttgcgactctgtaaatgacaggattatcacctatttgtcaacagttcaccaggagcatcccataatttcatggtgctccggccctgttgtatcattgcttcatagatagcaataatttgtttttgttgtgtgtgttcgctgttgcgttagggccaagtcctagctttgtgatgattaatttagaggtggtcaagattcaacatatttatgtttctttaccttaccccccctggacttggcaacttttcctgagagacaagtattcgtgtatcccccccttcttattcaactctggatttgcttattcaacagaagttgataaaaaggatctcccctgtgcaaagctcccagtctcattgttgcggcaacgtggcttgtcggtggttatggcaaagaaagttggcacaccttccttcttgtgtaagcgttatgatgaagtttgtagttcacacatctttctgtttgtgttaacattctttttccggagttaatgaggaaatatttttggcctgggctccaagaacgcacttacgtgggccggtaaatcttctgatgggccacaaaattttccaaaacattgggctcggtctctgggcctcggtagcctcgagctcgcaccacctcacgcttcacgcctcctccacagtccacacaccgcgccgccgccgtggactcgccgcaccgtccgccgcgccctgctccgtcctgctccgccgcgcgcagccgcctacacaaacctcgctccgccccaaatccagtaggagaagaagaagaaggggggaatccagtagcgttttgaccggaagaagaaattgaacaaaacgagctccaaccctaggaggtgcgaggcggcggcggcggagatggaggtggtggcgctcgtcagcggcggcaaggacagctgcttcgccatgatgcgatgcctggactatggccacaaggcaaggcaacgaaccgcagcgcaacccaatcacccagttctattctatcatccgtttttcattgacatgctaatgcttgcagattgttgcgctggccaacctcatccccgaagatgacgccgtcgacgagctcgacagctacatgtatcaaactgtatgcactcctctcttcactcatcgttagctgattagcagctgcttctagcgctgggctgtggccattcgttgctggtattctgtcaaattcgctgattgctatgcctattgttgatgtggctggaggcttcaggttgggcaccagattgtcgtgagttatgcgaaatgcatgggcttgcctctgttccggaggcgcatccgtggatcctcaaggcaaggcatctgtgcagggattgtctttattgttgttatatgctgctactgttcttatctagatgaaatttgatgcaatttcattgattggacttgcttgtagggagcagggtcttaaatataatgttaccacaggcgatgaagtggaggatatgtttgcgctcttgagcgaggttaaaaggcaaatcccatccatcactgcagtgtcttcaggcgccattgcgtctgattatcagaggcttcgtgttgagagtgtctgctcaaggttgggcctggtatcgctggcgtatttgtggaagcaggatcagactttgcttcttgatgaaatggtaacttcaatttcattttttcttcttctgcatattgtctggcatatcagaaactgtttactcaaattactagttctgttttggttattaatgtttgcagataagaaggggcatagtagctataatcgtcaaggtatatacagcacactcatgcatttgttctcttggtacataattttttttaacttccttgcaagtatgtatttaactgtttatcacatggaatatctgatgtttggactttataggttgccgcaatggggctcaaaccttctgctcacttagggaaagaactggctgaacttaagtgtcatctgctccaactgaatgagtatgttccccactgcctacatagatcccatttagccattttcctcttggaggtttcatgtattagaagaccttgtatcctgttataacttgtgggttaatgacccaggccttagcttctcgtagtgatcaatgagggagtggtttccaagaaacatatcacaacatatcgctctctttatgtctgttctcatgattttcttactaatggtcaatactagtcacttgcatctgtgcagcttgtaatttctccttttgtttttctatatcccactaggagttatggaatcaatgtctgtggtgaaggtggcgaatatgaaacactaactcttgactgccctctattccgtgtaagtttaaggagataagagctgaatgtgaataatctgatgccacttgtctgaacatgtggaccagtccttaagcatgaatcacattcaatgaaacgctgtaacttggctattgactatattctgagcatgcttatcagatttctgaagcatttcataatttatactactattatgtgctatgtgcagcagaagcattttgttaccaagatggaactgatgagtttcttgtactgcagaatgcaagaattgttcttgatgattttgaagttatactccactcgcctgattccatcgctccagtaggaattcttcacccgttaaaatttcatcttgaacacaagccaaattcttttggcaccgttggtgatagtgctattgcccaagagaattctagttatttgtatgaagtagatggagctattgcacacagtgatgtcgaaaagaaacaagagaccttgagtccagttacaactgttgatgcttgcacaaatatagacctatgcatctcaaagactggcaaaaagttgttctccattggttgttggattcaggatccctgtggtacttcagaaggtgcatgctcttgtgccttattgttctgtgtaacattaaattgaccatagtcccgcctgacaggaatatctcctttcttttgcatcttcatttgtgggaaacgtccatttaatatctccttatgtctataggcctgaagacagatctagtagcagttttgagcagaatcgagaatcagctcaaggaagaagggttaggttggatgaatgttctgtatgttcacctcttcatttcaagcatgaaggaatttggattggccaatgaagtttatgtgagctttattactgaacaaaaatgccctctgggtgttccttcacgtagtacagttgaattgccactagttcaggttggtttaggccatgcatatgtggaagttctagttacaaaggagcaagtcaagagagttctacatgtacaaagcatttcatgctgggctcctagttgcatcggaccttatagccaggtaagagaagcactatgtggttatatgtcatgggtatgttgaaagttgtatgcttctatacaatattctacatagaattcataagcaaggttcctgtagattagttgctagccaaatctaccagttcttttttctcctcagttgtacattctcagtgttaaagttttttgaattttgcttaggcaacacttcatggagagattctctatatggctggtcagctggggcttgatccccctacgatgaagctctgtcctgggggcccaacggctgaactagaattcgcattacgaaacagtgaagctgttgctaatgcctttggttgctccattttttcttcggcaatacactttctggtgtactgttctgcacacttgacgtccagtgaaaaagaacaagttgaacatacacttcgtagttcgtacatcaccagtttggattgctcaaataccggatcatatcccaccattctctatgtatttgcatcagatcttccaaaagggtaaggatatccgtcattctatttctcagagaaatgctttagtgctgtctggactctcatacttgaagcaccacaatgtcaagtgctcttcttaagttaagatagacttttcctcattttttcagagcatacgtggagataaaaccaatattgtatgtccccagtcccactaatgatgatggagtcccaaccagagaacaggaggctggagggtcattgccagcatcaagcgaagcttttagtgcctggagcgcacaatactctgacctggatgattcatgctgccaggtgcacacaatcggtgggaaaatttgctctgctgttgtttcagtcacaaatgatattgcattgaaaatctgttctacaactgaacaactataccactcggaggagcatttgaaagctttggctagattttgtgcattccagcttgctaagattctgatagataatggcttttcctgggacaacctaacggtacgtatctgtcctgtaatcattttgcatctgccttttcccgaactctaaccatcatctctgggctgaaatctgcagatgttaagattctactattcagtagagcacccagtgactgcggatgtgatgtcccgtgtattttctgaggcattcgccgagcttgaagaaggtggtgttggttcctgcacacctgatggggttcctattttcaacatcgtgccagtgtcggcatctggttgcttcacatcgttaagcgacattatatcatgcgagctattagcttcgaaagtttaagacaagaacttggcttgcgcatgtacgtgcatgatttgtttggtactcgctgaaatgcagttcgtttctttggccttttgggaggttggagccttagcatctccagtctaagccagaacttggcttgcacatgcattaggtaaacaattgcgatagagttagcagcgacatttttctgtgggttttatcatatgatactacactatatgatagtacatactataaacattgggcctgattagcggtcctgaagcttgcattgacaatttcgtactgacccccagttactagtacattgcttctttatgcttgattgaccttagttgcatgttggacgatccattcagagattggtgtggaaaacttcaaccgaatattgttcggtagtcaagcaagcacgcacgtctatccaagtcaggagagagatagcagatattccgaaacccaagatccaagaagttgttgtgcactcgtgtttacgattattaacggaagaattccagattatctaactaatgattttctcttcgaaccaacggtttactaattgaataatctaacaaaaatctttaaatagtgtatcctcaacagttcattccctcaatcagccaacagaaacggcaactactaacaaacaagtcctagaacgcttatataaaacggaacaatcaagaaaactcatcagtttcgaaagagaaatatacgaccagctcaagctcggaccgtccatctcagcgacgaagccctgatacaaaccaagcagcagcagctgctgcgcttctttgtctccccgtctctctcctcccgaccccccaaatttagccgttacaccaccttccgttctctctcctctctctctctctctctacggccaaggatctcaatcacagagaaggcacatcatcaaacaaatcaggaaaggaaggaagaaaggagaggaaaggagggagtgaagaacaaatcttgattcgtcctcactgcgcactgcccccccgtccgtgtggttccagctgatcaccagcagcggccggcgtcttctcgtctcgatccctcctgcctctttggccgcggctcgatttgggcggtcaagatgaacaggatgatgttcatggcgtgctgctacaacgatccggacatgctcatcgatccggacacggtctaccccatccgccccgagtgccgcgaagacgccgccaagacgcgattcaagcccagggtaattgattcattctatccatttctaattctccgttttaatctaattccgcgtcccctatgcccccgtccccattttgacagtgcccatcttgcgctggattggatctagtatctaattatcaactgttactgttacctttttttttatcttaactgttactgttacctggatgagctgaattaggctcagatggccaatcgattgatcttgcaagatgatgagggcatttagtttgaaggtagaattttgttgtctcagatcgatttgccgagcggaagcatcgaggattctgactagcgagattagtgccagccatgtatttgattatgaagtgcattgactcgttgtgtgctgtttcctcttccttttggcagcctggcctcactctaagtccaaggagatggaagctgcttcacaatgaagaaggtgtcctagacatagctggaatgatcaaaagagtgcagcgtggggtgagctatacttttcgattaatcccttgcatgctccgaactagctgaatttacgccgtgattgcaccacagcgccaggctaaattatactttttcagaaagtagaattatactgttatatgcttagaaatcaaataactagttttttttattattctgagattttcagttatcctacattgtattgatgttgactcttcattttaatctacactaatatggatctgttacacaatcaacaatgtgaactatgaactatttatttttctccaattaacatggtaaattgtagcctgatgaagtgcaaatgtggaggctaatatttgccttgttttaataatttagtaatatatagatatttgcaaaaattccttctcactaacaacacaagcctaggtccgtatgtcaatgagacaatggttgacagatgatccaaacatgatgggacatcaggaattcctcattttcttcctgcattcatgaatcatgacctcacactaaggccttgtttattttggttggctaaacagggtacccacccaaatatcaaaggagaagtttgggagtttttgctgggttgttatgaccctaaaagcaatactgaacaaaagagccaattaagacaacagcgaaggttcattcttaattgcacctttattgtttgatcatgtatattcattctaatatctcattctaattttttataggttagaatatgagaaactgaaaacaaagtgccgagaaatggacacggcagtcggtagcggaagggtaattactatgcctgtcataacagaagatggccagcctatacaggatcctaactcagttgatgcagaacaacaagctagtgacacacccctaccaaaggaagtaattcaatggaagctaactctgcaccagattggtgagtactaatcctctcttttcagcatccctcaatccgttttatgtttttttttaaaaaaaagagagagttcactgggcacatattgttatatttttttatactttcattggtctgattattccactattcaactataggtcttgatgttaatcgtacagatcgtcaactagtctattatgagagccaagagaacttggccaggttgtgggacattcttgcagtttattcatgggttgacaaggacatcggttattgtcaaggtgcgttacagaagcaaaactgatccttttgcaaatccagtcatagtaaaaggaaaaggaacacttaaccatgttagcttgctaaatgtcatgttatgtaaattttgctgttcccccccataaaatcctcttgtttgtaagcaggaatgagtgatctttgctcaccaatgtcgatcctcttggaacacgaagcggatgcgttttggtgctttgagcgacttatgcgcagggtggtaagcacctttacacatgtagccttttattcactaagaaatatccagatcctttaccctaagggtcagtggcggatctagaaattttattgaccccgggcaagccactggcagtactgtacaaatgaaaatgaacttgtacaactctacagaccattttaccattgacacaagtaaaattaacagtacgagttgcagtatataagctgtgatggcctatagggctccatcgtttggcttattataagaataagccaaacaacatatttacaaacgaaaaataatttatgaatacaactttaatatacgtgctcttagcgacccaaaagcaaaggctgaaaaataaactttgataaaaaaacctcaaaatcaactctaaatttaagattgaaaattcaaattttggctaataagcataagcataagcaaaaagatggggctgatagactgcaaacatgtgatggtgtgagccttaattatatgctttgctaattttctcaactaatctagcattcattaaggtaattaattaaaaaatatgctaactttgcatgattaatgaattgctaatctactgcagcatcttaggcggagcctgggcatttgccatggctggctgggccttgactccgccgctgctaagggtacaatttatacttccgatatatgatgttaattaaaagttgtgcacaactgcagtaatgttacagtaaacttaaaaggtcaatatggtcgctgtaatatgcagaaccgttttctggaaatatttttgcaacttagcatggcctatcaaaacaataattgatattgatatgaactaatgaacattatatgggaaaaaaacccctaagattgattatagtggttttgctgcatgtgttatctgtctctgttaatttttctacagatactgagagattgatattgtacatgctaactctgcagcgaggaaatttcgtgagtagttcaacctccattggagttcgatctcaactgaccatattgtcatccgtaatgaaagccgttgatccgaagctacatgagcatttaggtagagttgtttggagccaaatattgttcattagaatggccaaaggaacaatgccttttctttctgaattattgaactataagtagcgtgatttattccatgatcaaaagattatttttgcagaaaatcttgatggaggggaatacttatttgccttccgtatgctgatggttcttttccgaagggagttctcttttgtagacacaatgtacctttgggaggtaagcttcccaacaaggtcgcataatttaaccttttaggtgtgttgattagttccctgcaccataagaattttcttgacttttcaattattatctcatgattatcctaataaagcataatcaaaatgtggtttctacttacaatcaagtattgatttgtactgtggaaggtttataaggctgtttccttgatttacaaatgttgcagctcatgtggtctatggagtacaatccaggtctcttttctatgttggagagtgataacagtacatctcaagcaaacacaaaagatgaaaatgccttaaagcagtgtggaaaattcgaacagaaaaacttacaggcggctaaaaaggaagagcagatacctctatctgtgttcattgtggctagtgtcatagaggctagaaacaagcagatactgactgatgcaaaaggtctagacgatgtcgtgaaggtctctctctctctctctctctccatgtgtgtgtcatgagatgatgattgtagaaagctatacacgattatgttgtttatgtgcttgtcccctgcaaacagatattaaacgatatcactggaagtctggatgcaaagaaggcatgcagaggggcactgaagattcatgagagatacctaaccacagtaagatttctgttaatccatttgtataattatatggccttagacgcactcaggagtcaggagtcaaaactaaaataactctctactttcctaaactgcaggtaaaagcatgatagtagcatttacagatccttattaatacatcttaagtgacgatattcgattgggctttttgtgaactggagaagcagctacatcgcaatttttccccatttttgatacgtgtgtgtattatacaattctttgattttctttgtaatactacaaaagaaaggaacgccaatcctgtaaaggtacatcacgaaatgtttggtatcggtggaattatgctgcaataacatcgtcatgattcttctttcctactgttcttgacactgcaataaatttgttcactatttcttaagaatacagtgagttaggaaaaagaaaatcaacttgttggattccgaccatgtgtgtaaatattgtttaaaggattatttttcattttctttgttgtagcttccagtggactagagacggaagtggcaaaacaatttggctacattaagaaacatgaccaggccgcttgaaagtcttgatcgaaaaagctaagaaacctacgataatcatactatatatcaaaacatttgcaccgatactttatccgttgttttccaccggacactccatactgattgaatcaagtattagatcattttgcgctgctgaactcaagctccaatgcaagcttcgttaactacctacgaaaggatatgggatatgatcggaaattgtcaaaataagaggcagattggcttgttagctaaatgacccctttttcatgttctgagttgtccatccccgccatttgcgctgcagaccagttaagcaaaaccagggcctcacaaactgctgtatgtcaaaatgaacttcaaccaaaaggagcctagaccaaaaatagggaaccataaatagatcgaggcaacaaactttctgcccttccatttctccaacttggaagagagaatctatgcttgttcctgtttgagctttggaagggattgcaattccactaaattgtgatagatcaaacagcaataggtgaagagaattgctgcagacacaatgaagatgtcataaagaagatgaaattcggtagatcatgcttcatcaccctcttaaatctgctttgcaaggtatgtgagtctgattcaattaggcgccacaaatttgtgtgtgtcaaatagaaactgaacttcagaatgttgaaaagaacaaatatatacattgctgaatcttcatcttccagcaaatcatattacgatagaccacaatagttgttttgttttcaatgctacgtggtcggtagatgtaaatctcaccccaacacctatagcattatcaacattgtattttgacgaaacattcagatggcttttctcgttttttttatctctgttcacggtggtatttcatatttgtaaaatcaagcttatggtcaataggttgtatcccatttcatagaattgttagttcttacttttgttttttaaatgatattggcccggcgaaaaatttgtaatgttattgcttacttgtgaaggctagatcaagggacaaggggtggaggacaaacatataagtggtggattcctcgcagagcaccgcgggcgggcagccgcctgtggaaccggttaagatgaagggccttctcaagggcctccgatacatctcacaaattttcggtacgcctcgaacaccatcaatttccaagtctaacgaatccctattccccaattccccaatccaattcacctcaacattgttcatgccacacattgataattcatcatcattcatccacacaacgaaaatcaaaatgcattacgggatggcgttgtgagagattgtgtaccttgtctgacgaacacgcgcatgcccgcgcacgctggtgttgtggggttggttgcttgcagatccgagcgtgaaggagccggagatgcagatcgggaacccgacggacgtgaagcacgtcgcgcacatcggctgggacaacgcctccgtcaccgcgcccagctgggtgatcgccgccgccttgctcctcccccccgatcgcgccatctcccatgtctctaactgctccgatcactggtcgcagatgaacgagttcaagccaacggcggggggcacggaaggcggcgaggcggaggagaaccaaggaggaggcggcggcagagcggaccaggcggagcggccgcggcgggcggggcggggcaaagagcggcgcgacggaggcagcgaggggtcgcggcggccgccgaagacggaggtgggggagaacaactgcgagggagaagccgccgcgggggcggcgccgaagcagcggcggaggaaggcgagggcgtcggggggcacctcgtcggggcggtccaagtcgtcgtcggtaggcggcggcggcggcccctccgcggcggcgaggccggccgcggcgggggatgacgacggcgacaagtgcttctgaggcgacgctgcaacgcgcgatcgctctctcgttgctgattttttttttttttttggcgtggcaagcacgaaacatatggggggaggatttcgaatttgtatttgaggttttcgtctagactccgggctgcttgcaggagaagccatcaactaggaagaatttatatgggcctttctcttttcttttctgatttttctacatcatttattcctttattttgtacttatttttgtggcgttagagtttgtatatgtaatgtagagttgggccgagaaaacaagtgacggcctgtcacgttgtactgtatactaatgttataatgggtcaagttgggcctcgggccgatcagttcatccgcaagccgaccatatgggcttcttgcttccatcacgggccatatgggccttttttccacgcctggtccacatgcctcttgggcttacctttccccacatttgccctcagtaagtttatatttcagtgtactctagtactctaccaagctgcctctgtgtgcatttgtaaattctctctcttttttacagtatcttctttttgtgttgcaccgtgtattagttttattttatacttatttgtattatttcagaaataccgatcatagtgatcactaattgactactccatattgtaactcctctcaatttaaaaatgccagttcatcatttcgggtcctgtagatggagacatgacgaaaacaaatatagaagatgctagataggtatctggttgcattctatgttcagtttgtctgcaccttggtgatcaaggacggagaaacttaattttcagtaaaatgagagaatattaccatctatgaaacaaagaagatttgtcatttgtcttcttcattgccaacaatgacaatacaccatcctggggcaagcctctgaactgtaaatatcttcattccacattattccacatattataatcttttgtccatgcttggtcattttcgtgcaaacatacatatacatctgctacattaacatgacatttacaccaattatagtggggctgcttaagtggcatccacctcagatacagtagcaagtttcagaattttcagaaacagattattcccaagaagaaaaggaactttcagaaacagtggtctatcctgttctttcaaatatattctctgttcacagtatccatctagcagtacatctcctgcaacactttggattagaaatcattcagcacatatatgaaaattgaagtgggccacttgcatccaccctttacgtcttgctgcactctgatagcctgagtgcctgacacctgttgcattccactcatcgccactgttacactcggaagagattgtgtatttgtgtgtagatgctggtcagctggtgccttgttcctttcctctgtgatcggtaactcgtttctactgaacctgtgggctctgtatacatatgacatagatgcagcaattcaatgctgaatttgtagcttaattggatatgcaaatatgtgtttcttgctaattactgaactttcaaaaaaataaaataaaactggcatccaaatgtcatcgatttcactttcaccacgagctctgaaccagcagttgcttctactgggaggtactgaaccgaccaaactgaaagatagcgtttttgattcttatcggccaatagagagctgaagtagatgtccctggaccacagagagagagagcatcattttctccttgattcgctgttgatcgatgtgctaccatctgtgtgatcgatcgatctatcaatcgaatcgagatcgagttgctgtcggcattattgtagggtagttcacctaccgtttttcctgcatatatctacctgggtctcagccccttccctcccttctgaaatcgagtgctcagctgccgccgcatattattcagagattagttcagtattcagtccacagtgacgagcatgtccgtttgcaacgccgagccggcagttcgccggacagatcggcgaggatgattccatccccatcggcattgcacttgcacctggctgtatctatattagaatctgtgatcagaaacacagcaaggccttttggccattttctgaactctgaatcgaatggcaggttcagtttggatcgacccgtgaaccgtttgttggtatctgtggatggagcatgatccagtgtgtgatcttgcaggctagctgctatcttagctcttgactctttcccaagagtggtcgttttggattatcgcaaagattagtttaacagtaatgatactgttttgtactgttagtgccgcatgggcatgcagatggatctggacctagatagatagataggaaatcgagattgcgtcggtgatggatgatcgccatggacgtctctttctcccttaacatccatagctaattaatcttaattaggagctggatttggatcgatcttgagctttagggcgatcgacggagatggaagcatcaaatcccccacacgtttgtcgctggagcgatcgctgtgactgagctcgctcgatcgatcagctcgcggtctggctaattagtggaggggatcagatgctgtcaacctctccacatttaatctcttctcttgcagttggtgtcattctcctttccctccttttcggcggcgagatcgatcgatggatcgatcggccgcgtcagttttgggggtttcttgaaagcaaattagcattcaatacagggcaaaaagggtcaccaagatcgatcaaatcaacttattcctcgtgcatccaaggtttaattaactgatagtactacctttatccgaaaatatggagtaagaaatgagatatggagtacattctaattctgcaaatcttgatagaatttctatgatatgtctcgtgtaatactagatttttatatttcaagacggatagaataccaattaattagttaattaaattaatatatcatgggcaaagcaggggggcgtgcatgctcgacgcgcggcttggcagacagactgacgagttagctgaaacagaattgatactaataaaaatctacatgatggattagtgtgctgatagatcggccgtgatagggaggcgaggtttgtcgcgaggcgatgtcgaaggagccttgattttcacgaggaagagatcgatcgatcgatcgatgagagaataggaagagaaatgaatcaaggaagaggcaggcgaccaatgggaggcggacaggtggaggggtcagtgtccaggcctggaagctaggcatgccatatgtgcggtgccatccaacgatcggatgatccaccggagcttacttgcagacaaccgttttcccaccccgtcaagctacccacccccccacccccatgcatatgccaccacctccctgtatctctgtatgtgtatgcgatacgctctaccctctctctgcctcgtatccactactcggcatatacgtatacgtatataacatgtgcgatgatgagttgtagtacaattcatctttcctaatttaattcaatatacgtttactattctaaactttcaagagaatatttctcttgttatttgcatgtaatctaaatgcttataatttatttagaaaacaaatcaactagatagattaatatgtaatatatcacttcacaaacatgtaataaaaaaatgaatttgactgtgaatatatgttagctagctatattttttttctcaacttacatttttaacttgcatgtttgtgaagtgatctatcacatattaattcatcttttcaaattatcttataactatttaaatgacatataaataaagaggaaatgcccccgtcgagagtttaaattcactcctctatttatactgccacagtaccatagagaagtaactttaattttctatcatatactaactcatacattaacaattaaaggttatttatcctaataatatatatacggataataaaatgctaccaataaataccacggtaaacgtagtcacaatggtaattggctagtaataatactctctctgacttaaatgtagttcaaatttaaaatatacggatgcacttatttatggtgcacttattttataatagagaaaatattaagagcaagaataatagtagagttcattagtttatcttaaagctaacatatataatagagattagctataaggtttgctataattttttttctcctctttctatctcttacttatacatttgatatatttgtcttcaagcttatattaagctagctcttgtatgagagctaacatccttaatttttttacacctctcctccacgtaagctactacctccgtttcaggttataagactttctagcattacccacattcatatagatattaatgaatctagacatacatatatgtctagattcattaacatatatatgaatgttgataatgctagaaagtcttataatatgaaacggaggaagtagcttacagtaggtttatactccctccgttccaaaaaaaaaactcaatctaggagaggatttgaccgctcctagtataactatcttttatctagatttgttgttttaggaggggtcacattatttgagattgagtttttttagacggagggagtagctcacattatccttgctctaattaagcgtgctaatctgtatgcatgcatacgggttaacattaggacgcgtgccttgctgcaaagtgtagtatagtacgaggtcgctgtctaggagggaatatttgctgacgacgagtcgtatcaatcattgcggctgcctgccacacggcctcgccgcacgcctcctccgacctctccttcaccaccgcctctgctccccgcccggccgcgtcctcgtctcctcttgctacttctgcatccatggcagatggcacaagtttaaacctctcaggttaacttagggtctgtttacatctcctgataaaaattttcgctatgtcacatcgaatgtttcaatatatgcatgaagtattaaatataagttaaaaaataaataattgcacagattacgactaatttacgagacaaatattttaagcctaattactttatgatctgacaatgtggtgctacagtaaacattttgctaatgatgaattaattaggtttaataaattcgtctcgcagtttacaggcggaatctataatttgttttgttattagtctatatttaatactttaaatgtgtgtccgtatatccaatgtgacacgccaaaacttttcaccgctggaactaaacacagccttagttactactactacctcctgaaagatcagactgactacttgttatacagatatatatttgctttcattaattcctgaacaaaatgaaattaacctacctcaacatgcagtggatgcatggttcatgcagcagttggctggccttcagagagctgggctagcttaggagggtgtatatgcgacgttgaaaatgactcaacgattaagcataactaatgctgtccatgcatagtgcacaggccattcctgaaatggagacacacagcccactcaatatcaccacagtacatatatgttttttgtgttgcataattcctcttggagatcagaggagcccaatgcaagcactgcacatagaaaaaaaaaatatatgcatggccgttttgcacatcatgcatataccatcgatgggacatttgatgatttcgtgtaatttggatcctaatggtagcaaggaaaagagacagaggaaggataagcgaagctttttctttcttggggaggaaagcttgattgagctcttgatctcgcataaattttcagtacgcagccaaaaaccaagcatcaggctggtagatgctgcactgcaatagctagccaacttgattaatccgacactgtcagtctgtcgctgtctgtataatgttacagtattaattaggttcctacagttacttacttccatatatactccctacgtacaaacatatatactgtattcaacatcatccaagcagctagagttgagagatatggagggtagtgtttttattttgttcttaatgtgcaaattgatggcagattacatatgcagcttcggttgcatgcgtacgtactttgctttagccttaaccctgccctcatgacaatataatactagttgcaattacatgttttaattccgtgagtcaatgcttcaatggaatgttcatgtagactttgagatatactactactcgagagaaaactagtttaaaagcgagaattttgggggtgctcttttggtttctgtcgctttcttaggatttgaaaaagggcactgttagtgttgagtctgattagtaggaaggaattggtggaagaaatggagtatggagccgtcactcttcctataaacaaccctagaaaaactccagcagggacaaaaaagaaatctctgaataattataaaaatatgtacagaatgccatcagctcatgatgattgtgtccgttatattcttttctagagaaagggataagggccagttccatttaagaagcttattagtagtaattaataactaagcaaatgtggttatgctttttagttgtgttgtggcagtagtattcttaattagggatccctatctcctccattggcttccgattaagagcagaaacgatcacaacgtcgtctgtcttttctctgtttctgttcagagaaggacaggggatcaactcacaaatttaagatgcctccagaagtagcataaacaattcatttatatatgcatatcttggcattatatatagggcctacttaagtggaaactcatgaattgttggtgagaaaataaatcacaatcttgactgttccttttttccagcaccttttacctgtacaagaacaactctaccaccaaacatttggacaggagcttttcactgaatccttgatagcaagctgcagcaggatcaatcaattagtactatcaagaaatggataatatactgtgtgtttttatccgataatgggatggtaatgtactgtgcattgacaacgaacaaagcataattaacatttctgtagacctgattgacactttggaaagtttggattacacaagctagcactccacataagcactgcacagtgctctaatgctctccatctccactggatgccgcgtttgcttttccgcgtgcactcgatggcaccccatgactgacttgttcctcagacatgtagctacatccatgcagcatggtcactgagactgtttctggaccagatcgattctctgattctctccctgcctgaaccatacctttcttgctggattttcgactctgctgcacttgtgcgacaatatctagctgctgctaatcagttttaattttctcagacatatgtccgtcgtgcacactgcactgcaaacagatctcatgcatcgtctgtttgctggcttatcagccacaaacaaaatttaattttaaaagttatgttatgattttttttcaccgtagtagcatctttttttcagccttatttttaagccatgaatagtatagatataagagatttatttataaattatttttggttgcttctttcatttcgctacgactcatcatcagccatagcttaacaaattgggattttaatctcctgtttgcatcattcataacaagtcagaatatgtagtagcaagtactttatgtagtactttaccggtcttgttcttttctcttttccactgcccttttggagtaagatgccaacgatttcaggctctgaagaaaatagaaaaagtccagttagctagccagtaccagcagctaagcaggagatgtctgaatcggtgttccctcctggctaatcttttctgagctaaatctactatgtaatatcctagctcccgttaattagtaatccctccgttttgttttatattataagttgtttaatatttttatagtcaaattttattaaatttgactaagtttataaaatttagcaatatctaaaatattaaattagtttcactatacctaacattaaatatatttcgataatatatttattttgtgttgaaaatgctattatattttttataaatttaattaatttttttaaaaaattgattagtaaaagatttaaatgatttataatatgaaacgggaggagcagcttgtagcagctaaatactctggctaggttagcttgttctaggtcccagctgcagaggtatcgctgtcattgggtgattgggattggacaccttccagatcgagtcgccggcttaagcgcagcatccatctcgtcctcagttaatatatactccatcattttctaaatatttaacaccgttaattttttaaaatatatttgactgttcattttattcaaaaacttttataaaatatgcaaaactatatgtatacataaaaatatatttaacaataaatcaaatgataggaaaaagaattaataattacttaaattttttaaataagatgaacaatcaaatatgtttaaaaagtaaatggaatcaaacatttaggacggagggagtactatacgtatacatacatacatacacatcagggtgatcaattcaagcagttaatgctaattattccccatgattattcagcgttcgcgaaaaattccccacgattaattcccacgttttttaaagccaatgatcgcctcttttttaattccgtcctatgccctgttccttggtgttaattgcatgacgtcactcaatcatctccccaagttagtttatctatcctgcctccaactgccatgaaattgcattgcatgcatgctctcatcaatcctgtcctgacctggagtatttatctctaagccaatcattttagttaactgcaactcgcacaaagaatactgctatatcacacagaaacaatatccatatctctctctcttttttttttaccatcgcccatgtatttgcttgtgcctacctacctgtagtcctgcatcgatcaaatctatcgccgaccatcgtctactttaattcccaacatatatacttttgcataggctcatactcatactcaagtatatagtaattaattaaacatacatgccgcttttattaattattcttgctgtgtatagcctagatcgagatggatattttttctgcacaaggtacttagctatatagagattattaatgagaagagtagattattaattgatgatcaggggagggatgtaataacttaattaatttttggataattaagccgcaacaaccatatgcatgtacgacgcagctagcatatggtacatgtacttttgatatatactgatcacgaatacccgtactgtactttttttcatctcaaaaaaaattacacgtactgtacttgtacacgtactgtacatatcctccttttattccgtcgcataagtcgcatcccactgttttggaataggtacttagctataattaattaatatgtaacgtatatatagctctagctgcgtatatacgcatgtgccctaatgacacacacacgtacagtactactgcaggagttcgtcagtttttatacgccagagagcacacgacaaacacggcaaatatacgtataaagtattattatacatgtacacaatgattgtacctcgcatttctcgattgatgatgatgaagaacttgaattgatcatcaacaatacacctgtacattatgcactgctactacttcaattagagaacgttttgccgtcgtgatatcattatcatctgattcaatttaatcggcagtacagtgtacagactacagagaagtacagagatcgatgcaggctgaacagacattatttctgacattatctccgtcgttccttttctttcgacatgcctgtactacctctaccgtttgtttaatataatcatctctctcgtcgctttctggtcttggagtagaagaaataatttccgattctctcatgattaaattcgcatcaaaatgcatgatcgatcgatcaagcggtgaagcagcgtacggtgattacctgcagctagttcctgacagcctctctccctgctaattatcggtaatcaagctaagatacgtataccttgcttaagatgcacgtactgttagctagtaataatctccacaagttgagaatgcacgggacatttgtttgcatatacatgttaaatttgcttctttttttccaaataatcttgaaattcgaattaataaatacaaagttgtatttagtttgtagtcgtagtccaaaatttattattcctattttaatggtttaatatctttaaaatttaaaacaaacaaacaaataattctattttacaagctcgaactattttatggatcgtttaatccctccctgaaaaaatattttttctcatatttggcctaaactactaaactggttcactttactccctaataacatttctcttttttttatttttatataagttatattttaagttgcaattttatagtgccatagataacaccactatgaaagttcaaaagtatttttaattttcttcatgattgtttgcttggttttagaatcttgatgcttaaatcagccttaggtgcttcagccctatgaaaacagtgataaaaataaaaaatatattgagacgtaagttgcaatacatcggtcatcatcctaacatttttttatttacaaaatacgacttatatagggagaaagaaaagagaaatatgttaggaagtaaagtgaaacatttttgatggtttggcggtgcgaatgagattttttttgaggggctaagtgctccgctgaaatagtttgaaggggttttagaaagaaagaaataatttgagggggtagtccagcgaaatggttttcattacttaatatgtgattgtattcgtcttgatctctcgattttactattataacaactccgaattctgaaattaataattatcaagttgtaactgatgtggtctcttatgttagtttgaaccattttatttagccatacacctacataggcggttcgcaagttgtatgtggatgtagactaccttattaatcgtgccgttaatttctcttttcaattacacggaagacgacacgcacacacaggtttaatacctagacttgttatccatgatatttctttgatcaacatgctcgataacttctctgaatgtacagtatacgcaagctagcaagtgtaggcggattgatatattcaggggcgctgatccttgttttatcctccgtctcgatatttttgttggcttgcattttgcataattaatcaccgtcctatacagtacactgtgtacccatgtatgtacctgcactgtacaaacacagtacacacacatagatgcacttacttgtaagcaaatttaacaagcttagagcatagacagacagagagacatgtagagatgcatactagaggccgggatcgaggaggagatgctgtacgtaggacggatcaataattaagcctagctaagctgtgtcatatacgtatgtcctcatcttttcgcttatacttgtcagtcaaaatttaaatttttaatcttaaatttggatctggttttgaggttttttttatcaaagtttattttttagcctttgatttttgatcgctaagaatattataaaaattttatttaaaaattatttttcatttacaaatatgccgttttacttgtaccacgaataaccgaaacgatggctccccgatcttgcacgcggttgaattgatatgcacacaaacacaatgataatgggcagctagagatcgatcgagctcgcgttttttccccaaatgcgtctctattgatagtgccatgtatgttgccgttgtcgctgcacttgggggatatgtacatatcgatcgtccatcatcaagtgggccggccgtggcgatgatctttcttgcgaccctggatctcctctctctctctctctctctgtccttcttcttccttgattcctcttcctccccaaccccacctgccctcctcctcctcttctctccagagagagagagagagaggtcgtcagtgaatgcgacgtcgtccgcgcacgcgtcctctcccgcgtcctccgcctcctcccgcgcgctgcgtacgtgacagcgccatctcctgcttgcagcagctagcaagcagcaggcgcaacagtattactgcagatagagctctcgaccgattgatcgattgctcactgccatatacatgatacttacataccgacgtactacacacagagatagagatcggagctatagctattgctattgctagccatagtatagtagtaccctttgctcctgctgctgctttgttgcttgcttccctacacttctctctctcagctgctagctgcgcatataattattccctcgccaagctatatatatttgcctcctgccttcttcccgagctcacacaatcgccaacctatacagatatatgtgctagctacttccaagttcctacctatcaatttctctcctcctcttcttcttctctgcatcaatctgcagcttaattcttagctatgtacatatagctagctaccacttccaaaatactccacagagatcaatcacatatagatatagctagattgctatagacagagagatcatcaaagaaatttagcaggtgatagccacatggggttgagggacatcgagctgacgctgcctccggggttccggttctacccgagcgacgaggagcttgtctgccactaccttcataacaaggtggtgaaccagcatcgcttcgccggagttggaggagccgccgccgccggcggcggcaccatggtcgaggtggacctccacacccacgagccgtgggagctaccaggtaatcacttactcaatcaaaattaattaattaattactactcctttttcctctcccacaagcgaccctctcactagctccaaatcatttatagctaatgtaatagtcaattcatacaatagttgcttactgtactattaatacctggtcctacctgtcatacacatattacgtcttagagtccgtgctacagctgactatatacctatagtctcctgctcttctctctcttcctttatctttttaaaatatgtttatagctggcttatagcttgctattgtacctgctcttagccacgcgccctctctctcccctcttctgcatgattatggttaattaaatcgtagatggttcctccgtttccatggaatgattaattacgcacgcaaccacgctttattggctccaattaggattgtcgttattcttcccccttgttaattaaccaacaaggcacgggtcgatccatcacgtatatctctgtgcgcgtatgtgcaacagtgtgttatatattgcttctggtgcaagcatacatatacctatatctataatttatttctttatgactgcaagtgggctatctaagctctagctatagcttgttctctttgtctcttacgattacgatcaaatttcccatcaatttttatacatgtttaaaatttaacttatttcattccatatcaacattttcttcaggacatactactatatgtgtgcataaactctccttaatttccccgcgcgccggcccatcctattctcaaaaaaaaaaaaactgagaacaataaaaatatacataatattgaaaaagattaaattaaccggtttgtttaatttccctcaatcaaatcgatctgctttccaaaatttctgaataattaacggtatttctttacaaaactgcaggaacaagtttaatcagaatcatatcgaacaattaatcaagtagctagtattataccacatactgaatatattacggttgatctcagattagtctagattaatcgagttgtgatgtgaaaaattaattatggtgtgcatgcagatgtggcgaagctgagcacgaacgagtggtacttcttcagcttccgcgaccgcaagtacgcgacggggctccgcacgaaccgcgccaccaagtccggctactggaaggccaccggcaaggaccgcgtcatccacaaccccaagctgcacgccgccgcccaccgccgcgcctccatcgtcggcatgcgcaagacccttgtcttctaccgcggccgcgcccccaacggcgtcaaaaccaactgggtcatgcacgaatttcgcatggaaaaccctcacacccctcccaaggttagtcctcacaatccaactaatttctccaataatttccttactcctttcatcctcaaataaataaaatccagcacgggttatggtaagacctgtttagtcaaactgttttaagtttaaccaagtttgtagaaaaaataataatatttttaacccatgacaaatttattaagaaaattaattcaattattgatttgataaactaatttagtatcataaatattactatatttatctataaaattagttaaacttgaaatagtttgactttattagagttaaaacgtgttataacctgaaggagtatagtagtaacttttggttaatcaagagcttgagtttgtgtgtttaattttgcatatgtgtatgcaggaggattgggtgttgtgcagagtgttctacaagaagaaggcggagacggagacggagtcgtcgtacagcatggagaacgagcaggaggcggtgatcgccatggcacggagcgccgcggccatcaaggcgggtggatgctactccaactcctcctcgtctcacgacccagccgccgccggccatcactcgcccccgccattcccggcgtcgctcgccgcctgcagcagcagccaccactacagcagccacccaccgccgcctcccgatcaccaccaccaccaccacatgcccgtcaccggcggcggcggcggctccctcaacgagttcatccccaccaccagcatggcgctgtacagcagcatcttcgacttcagccagcatctcgacggcggcgccgtggcggcgtcggcgtcggcggcgggatcgagggtcgacggcggcgagcagtgcggtctgatggagctagggctcgaggagcactacaattacaacggcctgatgccgatgtgacgatccaccataggtgtcggtgctgctagtgctagcttagctagcttacacacactcccagctgctagctagctgcagttctgcagcgcagctagctagcgtttattattaataacctcttttcacctcgattgtttgatctgatttgtttcgtggtgatcgattccatcgatcagcttgtgcagatttcgttgattgtgcatgcaaacatgcgcacctgtgtatagggtatagtggtacgtcgtatagcgctgttgcattgtttggaggtaaattatatatcttagcctttaatttgattgagattgcagtagtagcagacgtcgtcatgcatgtgtacatataatgtatgaatgatcagtttctgttgatgggtggatatattaatggagtacttaatttggaaccctttttctagtcctttgctgtatctttcagtctgtatcagtgtggaagcttcaaacttcactaactgatccatacaaattaacagctgcaggtagttaatattagctacctggttttagttaattatatatcctagtacataagagagctagttttagttcattgctgtatctgtgtggaattttcaaacttaactaactgatccacacaaattaacagaggaacttaaccatcctacataagagagccagctagttttatacacgtaattgtagaatcatcaacaatttgcccaacatactgctgtaaatatgcagtggccattaatataggatctaacccacaattgactgacaaccccagcaaggtaattaaacactgttaggaaggagttgagaggagggaaaagtggaagattgagaagatacacaaaataagatgaaccatattagcgtataattaattaaatagttaattattttaattttaaaaatggattaatatgatttttaaagcaacatttctattgaaagtttttaagaacaacacatcatttattagttcggaaaagaaaatgtatgaggtaaatcttctcctctcaatatcatgtgaacaaacacaacctattcattacttcaaccggcttatatgccaacactcacctctacgcgaggttccctcaaacctcgagacgagactgaaatagaaatgagctacaattattgatttaattgtgcatctgacatgatttgaacttcagattttcggtctcgctaacatattgagttacgtacactaactaattcaacttaaaagcttaagctgataaagaaaataaacaacaatcatcgaaggagcaacagtatgcaagctgctaagtcaggagaatcatatcagtcttgctgctgcatgcatgtgggtgcaggctgcctcttgtatgtcacacaacagtagtactgaacgaagcacacacaacgacccaagccggccattgtcgtctaggttcgtttgttctctttctcgttaatttctgtgatatgatctgatgtcttgtcctccatcggcgccggggcccctatctcgcaacgtccatccatcaccacgctttctgaatgcttgttttggcagttagctaagctaagggcacagggatctcatcatccatcagatgctgcctaattgtgcattgtgcactgaaaattaagtacatgcaaattgattaattgcatgtcaaacagtgcttctgctagcttaatttctatggtcataataaatagcatagcatctagagcaggcaggaccactactaactttttttttctgaacgatcatgcatgtgtgttcccctacacattgatcgtttgctgcttaatttcttacatatatatcatgtatagattgggtaggaccacacactatactaatgcaagcatacatgtatgcatcagaaaaaaaacatttgtttttcatcaaggaataattagaccactgatctttatggaatcttcttgaggcatatatgcatcatgaagagtgtgcagctttatgtttattcacaatcagaagtactggtcctgatgttgactctgtgcatgattgtaaactgattggttttgagatatggatatatcggatggattgcaatatatatgtgtgtttaattagcaaaacgggtggattgcaatatcgatttgttcggttcaatttaatttgtcgtctctgcagcaaccaatttgctgtgtgcatgtgacgagttcatgcatgcagacctgtactgttgatcgaaatctggtcgcatgcacttaagaaagaacaaattatctatggacatgaccacatatcatttctaaatgatatattacacaaacagtatacgcaagacacgcagagcatagctaatctaatactaattgcagattagttgctgtcttgctgatcattggctgtgtcgattggttacgtcatccggttactaaattaacagcagcaaagtttggtcggttacgtggcctctaactgatagatatataacatgggatccccttgaccattttaagataaggaagatatagttatatcctctatctttgaatgtaggatacacacaaccataaagctagtttgagttaaaaaaaataatctcagtaagaaataaaacccgtccccggccatgagataaaaaaaatgtacaaagtaggagcatataaattatgtatatatataaatattacgttaagtacaaaagcataagtatgaactgtattagaatcctgttatccaaagtggataaaaaggtccttgacgatcaattccaaaagtgtggcaaatatgttgacctaaagtagaagagaaaattaatccacgaaggaaactaaaagagaatttgctatctagcttgaaaatgcgtacacagtgttattacgtacaatacgtacatgagctatatcgagtacgtgatgcatacatgtatatatattcaaatggcatgtgcatatattgttaatatttacctaactaattccatcagagacgatattgtaaagtaattaaaacatgcagctaatggaccgactaatataccgcgtttacttgatgattaattatttatccccaacttgcttgcttctagcttaattgacaattgcaagctctaatgatcgaccatgtatatatatgtgtgtatgcatgcatgacctagctagctagctaattaattagtttatcagcctaggtacatgctgttccgaatgtattagctatagcgcaagtgtcctttcaatataacaattaaccgagatgtttgattagaagcaactaatctgagcacactggatatatatagtgtacttatactatattgcagtgatgagttaatttgtaattaagtattcaatcccttccatagttccatataaattattaaattagcatagtaatacaaaaatgccgacagaatgtccagcatgcagtaggtgcatgcatgcagatcaggccatatgcatgtgtcatcccctgttgcttaattattttgcccattgctaaagcttcactagtttgggatagctttcttatatatgttaattactatactatttaccgttaaaatcaagttctggccagattgaatttggccggtatgcatgcgtatgtatatgcatgctgaggatgaggatgaattctagctagctagctagctgctggaaaacaagttggtgtgtggatagctgctgtttacacgtaactacgtcattctgatctgtgtcgacagttttaatttctacttgatcgatgctacctggcttaattagttaccatcaatccttcataccgtagttgtagtttacatataaattatgaagcaatgtagtttaatatgataaagctagtttagttttattatatgttgaatcaccataggtgtggtagactgatgagcagtgccttaattggatagtagtaccgaactagcacactgactacgtaacgtgatatgatctatataaaaggtaggtttaactaggtagtaattaattaattaagctattgctcctatacagatggcggccatacaaaagctatctaacttttgctgagatcctttggagcattttaatttatactgatagaaaattttgtactgatagaaagatcgagtttggacgtactatcggtttttaatgaatgacgcaatcaattttgatatacatttgaggattcttctttttaatctttttacttgattaatatttatttttctgtgagtacttgtttaatttatcactaaaggttcttaactacgatttatatttttacatatttatacaaaactttttaacgagatgaatggtcaaacgttttgcgtatttgaataataccaataatcaaacttatttaaagtcaacggtatcatctatattatctaaaatcagagagaataattaataccagcccggcgaaaaaataataattaatagcaaaatatatacagtaatgctaagccagaacaagaggattgggaccttgcaaagccctgttgttaattagcatgtcaccctaatataaatgtagtactttgctcactgttcctgtcgggatcaagatttgtttaactagaaggtactgttcatgtgtacctacagtactgagtataaaagtgacacatgtcccaatttgttgcgtctcgctgcacgtaatttaattaagcagcgtagtcgttgctaggcgtttggacagaagcagaaagaataaatctaagccaaagatatgattttggttgccaaaccaagcaaaggatctgacgctcgaatctcgatcgatcggcaacaaatctagtgtgttatcatttggtgttaattatagtttgcttcactgctcttcggcttacccattttcagaggaaaaacaaacaaaacgtttagttcgcttctaagcttacacagccgcgatcaaacgtacgctgcactcgatcgtagagttttttccatacatgcatggggggatggcatggcaaatatagtgttacatttttgctttcttttgtttttaacaacccagtatctaaagtgcaccaaaatattgttaaatataccagagaaaaataagataaacaaagctaaaggataagttttgagagtaattttgcttttgctagggctcaggttttaattagcatcctccttaactttcgctgctaaaaattcgttgcaagttttctaacactatatatgatttcttttcttctaaatttttcataccgtaaataggatagagatgagagaatggactcttttttctaatctcttgctggtggcaagcgttgtccaattcatggactgttgtagttatagtacttcgtattaccggtttgatcagctctaggttatattatcgatgttacgcttgataatacagtgatatggggacatggggtgtatgattttaatcttgaggtttcgtgtttaattcttaacccgttcgtaatttcttctttgaaaatgttcggagggccgggcatctctccttccaaccctttttttttagccatccatcgcgacaatgcggcatatatcggcgatcgatctgctgtgtggtgcagcatgcttgaagggttgaagctaggcaggcagcaagcagcctggcatatggatgggtccaagtcagtgttagcaaaagcggccagcttttgttggcttgaccaccgcccaaccttgcatgcccatgtactccatgcaatatgcatatgctttgcttgcatgtcagcctactttttaccttttttgaccagctggtaggaatacttttcttactacagtggttaattacgtttttccagtaagatcacctaaccagctggagtgactgattgaccgtgggcctgcctcttaagttgggccaaaggaaaagccgaaaagtatggcccagtatggcaggatcacagggaatctcactaatgggcttggctattcatctgactgtgggcctgggcttagctctaacttcaattttgctaggcccatgcaacagattatgggccgtctggattcaactcttcgctaaacgaaccaatcgaacggccggcctgcctgacggattgatcccggcccaaaatggcatatgattactgtagatgtaggccccacgcaggcagatctgttccctggcctgaatcagcagcagcactgctcaccaagtcaccggtgcagcccactggtccagcttctgctgctgctgctcctcctgaccaaattgactactagggttgctttgtacggttgtaccacgcagatctttggaagaaacgaaaacgatttggtgaaacgctataaggcctagtagtttaaaacgaattattaaccatgttattattgcagtgaattatagttacacttttttgacataaattaaatattttgaaattaatagtccataacaagatatctaggtaatgcattagaataaagatttttctctaaaaaaatatattatggaaggaacggagcaaataatccatgacaataatctggtagctggaaaaacagggccacaataataattcttttgttgctgtcacacgggtcttctgtctcattctggtctaccctgtgtctagctacttggcacttgtcgtagaaggcaagctacagcaacacaaccgaaaagaccttctaaggtcaaccatgagcattttaactaagtcagaaatgttttgctctatccgatccaaactgtaagcattgttggaataaaatccaacagggattgagagtctaccaaggaaacaacgcgatttctctatcgttgtctccattgccctctttcgaggagcgaattacaattatatatccctagagattatatgggaagttacgaaggggccctttggcctccgcccactacgtggaggctggctggcaggcttggcctcgagagcaagaaggtaaaactctaggcgaccagaaaggggctgcctccattaaaccccccatcacggggttccgacgaatctcgggatagacagctcgaggccgaggcacgctatcgaggcgcctcggcattcctgcttgctctcgccgcggatacgtcattgatggttgggttcattgaatgcaccctaaatggcccgtcttctcgtcatagatgcttcgtgaagtcgcattttgccggagccacctcgaggatggtgccattctagactaggtccttcctggaggccttaccaaggcctcaaccgggcctccttcagagtcccctctggttggtaggctagggcacctacgctgagaagggtgaagatactcccccaagaagcatttctagattatttagtagatattaaggttaagaaaagaaaggcttcgatgtatctcaataaatttgtaacgaatagcggtgggaggttagttagggggtaagatggaaagaaattttaatggtaaatgattgatgggaaaagtaatactgtgaatagtgctaaaaatccttgtattatagcataagatttaaatcctattttttctatattttggaacgaggacgtatgtactatatagtctaccatgcatgtgttaaacatagtacatatcttgacattttctaaaccgaaactcctagataccagaagtacgtacctggtacgtacaaagcagtgatgacgaatgaagaacaaaaattaattgtgattgccctaaactaaagcactgaaccaatatagtagtaagattgatgaaatacgtacggtgcactttggtacactgcgtgtgggtaaaattaagccgtgttcccgtagtggagtacacatacacgactgcagtatactgtacgttaggatcggagtaaatgaagggagagcggggtaggtacagtacggtggaaatgaattgaatgacatcgccaacagtggccctttgtcctggacacaaacgccacagatctatcccgcggctaaatttttctgatccatggacgattactctcatggagttttctacgatcgatcgagcagcagctagctagcagtgtagtagtattttttctacactctctttcttcttcttcttcttcctccttcgcattgctgatcagagcgattcagagctagggtgtgtttcgttcacacgtcaaaattaaaagttttgttgaaattggaacgatgtgacggaaaagttggaaatttgtgtgtatagacaagttttgatgtgatggaaaagttgaaagtttgaagaaaaaatttgaaactaaactcgtccctagttgatgcctctcacctatcagtctcagctgcatgcatcagaagctgcaaaggagcctgcaaactgagttgctgctgctgctgctagatatacatttctcctctcagattacgacacatcagcgtacgtgcgagtttgttcttctgtgcgattgggccaccttaatttcagtagcctcttcggccctgcactagctagacgtactcttcgtcaatcatgggtacatgcaaagtagtatcagtagagcaggcaacatgaaccaatagaacgcgagccagggatttttcatttattaggggggaatttgtttcgccaaattttggcgcccacccgttccagtttctatctacttctttcaatgaacagatccccatgcttaaatacttctactccctgcctcccattttaaacgcagctgtgtgtatctgtatccaacgtttgattattgtccgtcttatttgaagtagaagccaaagtagtataatgcatatatagctctatcgctatatgcaatgtaagaataaatccctgttaattgctccaaggtgtgtgttaatttggtcagcatcgatcgtgtgtgtgtatatatatatataccccgcaaaatataagatatgaataactagaatgactagtagaggtttcaggtaccttcatttttcatgtacaattcatgcacatggatatatatgcttgtattagatctattcttatatttcattttctataataatgtggacaagagatgtgccatggccaatattcacttcaacagaagatatgggaattaaaggccaaaattaagcatacatgcatccaagggaggactaaagatcgctttaaaccctatactagttacaacaaggtataccgagatgattaattgatcaagaagttcatggaggcatagtaaggaatttaattgagggacaacaaaacacttgtcgttgatcaggttcccatgcattaatccaaggagtttcagcaacaacaatctaaactacaattaagaaaatgttccatcgccatgatctgctaaatttatttgtggatgctaatctatgcatggataacatgtcttttatgtcatatatatagttcttttgtgataattaatcctggtgtgtacgtcatgattaacgctagctatgataaacatctatctctcaatacctcccaaaatgacggtaaaaaaacatccatacgtgttgtgagtgtgatgcgtgtcgaaagtgtgaaattaaactagcctttacatttaaataccacctttatctatcaagtgttgtattaaattagttgattacttgacttgtagcaaaaaaaatgaacgaaataattttctaatttataataaatgtattagatgtcttgttgattgacattttttaagacactatgttgggaggaagtgtccatgcttatgtttagttaagaaatttgacataattctatgggttgttagctgctgaaaattaagaaaaccatggatagataaaagcatgagtgcccccttttattttcaggaaacctacatgaatggtttttgtgatgtataatgcagttttgggataaaattaaaggtgcatgtaatcaacatatttttttaacatttattgttgctatagttaaatgggttatgattgtttgagctatatggctgataaatcacgaaaaaaaataaatgaagtaagaaaaaaaattcatggacaagttttcatatctatgagcggtttaagggcaaatgctggaaaatagaatataatgaaaaaacataaaattaagcttaagaaaataaacaatgatgaaaaacacacacctaatatggtgttttatggtgagtaactgtttaccattgatattgatattatttttttcaatagacattatgtggataactatatttgcatttagacaacacaatgtttagtatttgttattacctatatatttggaatcaaagaaacaaaaaacaatcatattgcattaaaagagcataaattttatcacacacatatataagctaaaacatatttttatacacctttgcagaaaccaaatgtataaaattagagccaatattgtggcttgttttcatgaatataagcactcataaaaatgtattgatcaaactaagtggagcgcacatatatataggcaatgcaacgaaggaaatttagtaattgtcgtattccaaaggaggcctaggggtcaaataaaacactgacgatactgtgatacctaatcaatatacagtatatatactagctcaattaggtagaaaaactcatcacgcatgcatgcaaggtatgcaaccacaatcaagcaagctgtggctacagagagtcagtcagtacatatatatcaatcagacatatcactcacataaagattgaagccggccatgtgctaaaaattcttttgaatcccccaaaaaagagaagcagattgagttgcacgcaaagttgtcgaataaattaaatagaagcaatacatagaacagtcgactttaatttgtctgttccatatatatatgaaagaaaaagttttctcaactacacatatatatgcattgaaaggacaagcaaaatctaagatagtgatagatgcatcaactgtgtgaaaacaggaacttgaatgccctcctgctaagctggtagcaatgccatatcatatagtatacatatatatacatggggacagcagagatgaagtgaaagaacatgtgtgtggcactgttgcattgatagggacacaaaagactttagaagtgaatagttttcatgcaaaaagaatgatctgatcaggttctaacaaaggtggtaaactaactttaaccacaaagagaattgtagttttactgctgtctgctagctacctgaacatgcattctcccttctttctctttttttgaaaaaacctctgatcattgatcatttgagttgttacagaaacatatatatatgtgcaggtcagttctactatatatactcatcatcaggaataataaacaagtgaagacaaattaaatcaagtcaaatccagcaattcaaacttgaacaaggaaaggaatcagaagcatcaaagcatgggcaaaaatagggatcacccaatcgtactagtgcacacccaattgaaccctttatatatttttggtgcctggctgccttcttttctctccttttttgaaaagactcctatctttctttcttcttttgtttggtttgtttgtttcttcatctgttaccactttgcacatattgtaaaagtgaaagaaggtagtatccagtactgtaaaccattcaaaaactggcactacacaacaaaacattgttcaaagcaaagaacaaaagcaacatatttttgtataaagtctagctaccagcacacacatgatgaccaaagggagcacttgatcatgaatatatcaagaacattgcattgcacacagatcatagcccaaattaaagcatttggcatatatatggaatctgttcccaggacaagtacacataacacatgttgtttctgtcttaattaagctaccaattgaaatcactcatcatctcatcagctagtcgatctctccctttttgcccttttgctcaaccaagaaaggaagaccaagacatcatcactagtacatgatagatagaaggaagcattgctgacgccactgcacttggctagcttggcgacaagctattacaagaacaaattctacagatactaacactagctagcttgctatgcctacagcttctgctacttttgttcttgcaaatcccccagactaaaacaaatattacaactcctaattaggctagctagcttgagattctcatcaaatttactccagttcttgcatcaaaataattaaaccaaacgggacgagatcgatcgaagacagcagctaccaattaattgacgtcccaaagctaaggaaaaaaacaagaattaaactaagtactcactcatgcatgaccttcgtcctagcttagaaagcgagacagagatgaaattaaaaagaggagaaatctttttttgcaaaatgggagagatcgaaaccaattcaggaggaaagaagagatatgatgccttgtactggcaaagcaagatggcatttctgccaaggagattggaatttcttgctgcgaggctcgatcgatcaatggagatgcggagatggcgatggggatcgagaagaactcacgggatgatgaactgcggcgacgccgacgtgtcgccgccgccgctggccgagccgccgggtggcggcgggctcccctcggacgagggcccggctccggcgccggcggacgagggcttcttgcgcttcttcttctcgtagctgatccccctcgccctggcctgcgtctcgcgcacctcgcgcaggtagaggcggacggcgcgggcgccgaaggggttcatctccggcgtgccgccgttctcctcgtaggcggcgcggaggcggccgatgagcgcgtcgagggagccccaggcttggcggagcgggcacgggcatggcgccggcgggttggggtggccgtagaaggggcacaccggcgtgtgcaccttcgtcttcccgaactggtccatgtacttgaggaactccagcacgtgcgcgccgctgcaccgcgacagggacagcggcggccggtggttccgcaggtactgcccgaacgtgttccagtcccgccgcttctgcgactcgtaccggctcagcgacggcgacgagctggacggcgatggcccgccgccgccgcctcccgccgacgtccccgcgcccgacgacgacgacccggcgccggagaacatggcggccgcggccgggccgaggaagaagctgtcctgcgtggcgccgccggcgccgccgtcccccgccgccgggtcttgcccgccgcccgacatcatgtgatggtggtggtggtggtggtggtgatggtgacgatccatcctcgccctcgcctcgccgccgtaatgcaacctgaatcacaagaagcaagcatcatttcttgctccgacgaaatcaaacaagaagagaagaacctaagcaacgatctatatctatatataacatgtaccggatgaatctgcttcccgatctaggtcaggtagcagccgatctcctcctccactgctccactcgcagcagcagctgggatcgatcgatcttggcatgcacgagcacgagacgaggagaggtgtccgtggatccgggcgacctagctagcgatcctccaatcatccatgaggaattgaacagcagctagccaagtactacgctatgctctcctcgctctcaggtggtcaagccatgcttgacagcaagcaaggcagcagcagcagcagcaagaacctgcagggatcgatggagagagagagagagagagagagagagagagatggagtggatgaacagtggatgatggcgatgctggaggagtggggggaagagatggataggtctagccttttaggcaggcagcctgggaggagtagtgtgggtgtggagtgagagagcctacttgctagctaggtgtgtgaggtagaaatgggtgtagtagagcctagtagggtataggaaggctagacagcttggtgctagctactcagggggtgagaaaatgacaggaaagttaattaaagagaaattaatattcgaaatacaatacagatgcacacgtcgtcgtctgtacatactctgtgacttcggcaatttcagacatgttagccataatttctgtaaagtgtgtatggtgggtgtgtgcatatttatagctagctttctgggaggtgtaatatacaaactcaccatacacacttaccagaaattacagctaatatgtcttgagattgctgaagtcacaaagtgtctcactattggtgatgtcacctaccagttaaagatgtttcttttttgttttatcccatttacctttcactctcttaattccaaagtttgaacaatataaagttaggatgtttgtataaatatatttcattttcaagtatatattccatccatgtactagcaataatattatctttgcaattccttccatgccttgaggcctgcagggaggggagaagcatgacatgactgcaggataatctggaggggatggcctcttgtttctctcctgctgctgcttttcttgtcgatttttgaccgaccctaacttgttttttgtgtttttaaattctatcattttgcagatttgcagtgtggccgccggataggatcatatgatgggatggatgggtgcatcggtgttgcacgggcacacaactgatagaaaaatatgcacactatgtagctagagtgaacaggccacttatgttactactgtagacgacatgaaatatggtatgtggtgcacaaatatattgttggatgcttattatatatgtgcatcccttatatgtacacgtattgtaggtgtagtgttttgctgtagaccattgactggtgtggtcagggctgcatgttcccatccacctgaatgctgaatcatcctctctctctctctctctctctctctctctctctctctctcatgcatgatatgcccctgcccttaattatttttcatatataccgtataaattgtttcctagattatctatatctgcttaattcgggaaactatgtcgtatctgaattttattttttcccgcaaatactagcgtttaataagtattaaaaaatgagaaacatatcaagggaaaatttattatttgagaaactatatcgtatctgacttttttttgcaaatatatcgtgtttaggtattgaaataaaaatgagatacatgcaggggaaatttattatatattgcctgcaatatgtgtgcagtcaaaatgtgctctaaccaaaacttgcctagaaagtatgtttggctatatgaaaatgataggagtaaactcttcataaaatgctttaattaatctctcaatattataatttgatagctagtatactgatacataatattaaaaatatagtgatcaaattaagttatggatgcatgttaaccataaaagatcaatttttttttcaaaatttatgactagctagtttagccaatatcaaaaattacgttttctcctatattttgtctggatatgaccaataaacatatatataagttagatctgcttattgttattctaaaaaagatttataagagatatatagccgaacatatcttgtggcagaatcgagtccatttgtgtgcatcgatctggccaaaaaaatgggggatcgaatagtaaattagctttgagcacatacatgcaggagacaagcgcatatgaatgctcagtactgattgagcatgtacagtacagacatgcatgcccaataatactaagctagaatgtacacaactagaaaatagctagccaattaatcttcgacaactaatctctaacgattctcacagaaaccgtttgaaatcaagtgatatataacgattccataagatatatgcaaccgttactgggtttgtacttcatgctaatccctaatggggtgatccagaactattagaggacatatacgacatgaaactagttatcataaaatgtgtggacccccgatatggtagctggtcttgtacaaagctcctgagggctcctttaaaacgtaggaattgagaaacataggaataataacaatataggaattggagtggcatgccaatgtgatcccaaggaattgctcaattgtattgtttggatacttcatataaaaacaatatatgaatttagagagaggatggcataaagttaattttccaagagcttaattagagctcatgttagatttcctccaaaatccttatgaacttggccatattccaggaatttgaaagggtccattccatttatccaaaggagcatatatataggaaaatattccaaaggattcatatctacaaaattcctttaataaaacctttgtttcaaaggatcccacagagattacaagtcatcatgccacgtgagccgctgccatcccgtgggccgaatttggccactcctagctcggggtcactggatctagaccccacctcgccagctgtctcctatcctcctcacttaccacaccagctgcctacgacatgggagagggagggaagatagacctcaacctggacttgggagagagaaagggagagaagggggagggggagagggctcgatatagggaagggagaggtacacagggaggaagagagctagcgtggtgcggttggcaccatggtcagattaggagggaaggaagaagagggaaactatgagagaagaagaggggattttgttgacgtggggtggggtggggtgggtggcgactgataggctaccaacaacttatgttttcagccgtggagccttaggaaatttttaacctctcctagctctggtcaaatgttggtcaaccagttttctctatcggttcatggcataagctggcaatgatacaaacactatcagtttgtgataaaagccgacaataatactcagtataactgctggattatgtgatcagtttggaccataaatcacggtggatcgacaatgatacgctatcgctgtcggttcacactgaaccgacaatgatgaggcgacatggatgatcatttatgtggcaatgttaagtggataatactgagaggtatcacactctttgaaatctaaattttgatagatagctctcaagtatctcagatactataagataccaattatttttatctcttatagatagtaaaatttctttaccgcagtgtccttaaatgaacgattagatattactattttgaattatcaatgattaggctccgtgtagccgtgcatggttgcagaacataaaagaaatttataccaggcaaggaaattaattgaacaggtcgctggctgcttcacaacggccaccgtctctcttcgattcggcacagtagggccatgaatgtacgcgcccacaacccatgtacaaacacacgaactttttagagagagtgaaggggtgtagcatgcatgaacagtgccttttcagaaggaagagtttgaaattaaagttgtttggagcgacgatggagaaggagctgaggtaggaggacgacagtgacaagtagtgaaagttagtttgcatatggtaatttttttttcttttcggaaatcaacacaacgcagagtacagggcgctctagtacttgcaaacatatatataagcctatgaggagatagatcatagatctggcatcccactcattgcaatttacgaaaccctaatcctttcttcaagcacccccttaatgctccatgcagctacttacccacaagctaattaattaattcgacacaattcatatatggcattggcgcctaccagggtttacaaaaccgccggtaaccgcggttaccacgcttactgtgggggtacggtaaaaagaaaaccacggtaacctccttaaattcaaataaatttaaaaagtaatttgaaattttgataaattttacacggtttcgtacggtttgccacggttaccgtggttaccgcgcggtaaccgtgcttaccgccggggcgcgataactccggccccagtggtttgggataccttggcgcctactccctccgtcccaaataaaacaaatctagaacacaaatctgaataaagatatatctagattcatagtactagctaggatgtgtcacatccagtatcctatatagatctataaagttcatcccgagtaagtgtagttaatgctaattctctcctctctcataaagccacatcaccttaattgtttttagcctttggatgattcatcaagggtataaattgcatcttttcccccaaaaggcataccatacaacccaattatttataacatttgaataattgataaaagtataaaaaatagataaacacatgaaaaaaaccgtatagtagataaggaagaaaattttagaactcatatatactacctccattccataatataaggtacaaccacttttttttatgttcaataatataagtcatgcatgcatgcataccattaactatgatatattttccattaaattactacttttttaaatcctccactctcacattctctaactcggatgattcaaactacaagatgataataattatttcttggtgtttgtgttaagggtggttgtgccttctattatcacacaattctcctgcaacattgtgcggggtatttatctagttagattggttttttatgggacggggaaagtaaatcacatgcagtgacagtaatcagtgttgcagattgcatgtattaattgcagtacggcacgatttactagcaagaacagtcttaaaataaatactagaaataataaacatctaattaattcatgccgtgcaagaatagctacttgatcgccctagctagaggtcttaacaaaaattataaaaatatatctgctatcagcatatttgtaactttggataaatttattacaatcggaatgcagaaaatatagtttaatactaccttcatttcaggttataattaagactttctagcattgctaacatttatatagatattaatgaatctagccacacatatatgtctagattcattagcatatatatgaatgtgggcaatgctagaaagtcttataatatgaaacggaggaagtacacaaatattttgtggatcgataaattttataaatacatcaacgtccacctttaaaaaaattctagaattgttcaaagccatttattaattttctaaattcaaataatgcttttgagttataaaacttattaagtgcactcaagaaattgctaaagaaaagttacatatatatagcagtatcaacaggctagataaattatatatagtgttgaatggattgcaattattccactaaagattattttgtttaatttgaaacattgttttttgtggtgcaaacgagaaaacttgcaaaatcttgtaagttatcaattgaactaaaattgtttttcggtttgagccacataattaaattgccaattgacacaaaaaaactcaaaatataggtgaatttgggagtgacggatttctttgtttacgttattgaatagtatccggtttcaaattttgaggggtttttagactcaaaagtttaaagtagaaaaatggactctctctctctctctctctctctccttcttctaaataagtagaatccaggtgagattttacccatacacagatgttccacatgggtgtttagacattgtgtggattttattgtcgcgcggtgtaccacaattgacacgatcagtgtggattatttttggttgtcgcatggtgtgttacaagtggtaacagagtatcgactcttgctaaatgggcaccatttactgtacgtggccctatagcgcggcacacgacacaagacgttcatggcctacccatgtcttggcttgcatcgacctttgaggccatatgtttcactacaaatggtactagcatagcatcaacattcgagcacatcgtttaaacgataacactccaagtttaaacaccacattcgcagtgtgcagaccatataatcgttcacgtctcaaagcataaagtttctagagtcaaaaccttgtagaaaaaagcaagaacaaaacctcaggttagcttctatgcatgatgcatatgcatatgtgcatggctcgtcccatctggaggggctaagcatttaggggaactttcaaagaatgtacatatgcatttataatacccgggcccattagtggttgccaactgtaagacccatgtgtagtagctaatttgtccgaaatataatggagattttgaataggttggacaggtaaaccatacatttaaaccacggtaactacatgttaaaccttttacacagatcaatcgtcaaaatttaggaccgctttttggtaaaaaaaaagggtttacggctgctatatgcacatatatatcgccatgcttctatgaaacatcatgccataatacgggttatgaaggtggagtgtaattttttttttataatagcattattttttcccattactccatagaagttacaaccaactattatagagtctacacgatgaataattatgaattacaattatggcttgattagaaacaacaatagcaccctaaaaaggtccaagtataaataaccgttgtttctaccaacggcttgtattagttcatgtctttatcaaaccataaaaacaacatcatttgttgattgaatttcgctcccatcgctatcagcaaactaacgtcaaaccaaagaggaagtcaacatcaaagagtagttaacaatcatccgcccagattaccaccacaattaccatcgtatacgaatcgacggggacaccatcataaggacatcacactaacaagaaacctccaatgctatgacttcaagaaggttgcgacatcttaaatatcaccatcgctatttcagacatctagaacatcatctccaccgggacagttcatcgcatagcatggatgtccaccgggaagggcatcgcggcaacgcttataggaaggtgtgactcccataggcgtcaccgatattagtacttgaaagacaacacaactgcaacggtaacaaccacctacacccaccgctactaccaaaaagtgagtggaagacttggtggccagtgtcgagcggcgaccggtagcaaagtgcggctggcggacagcacaacgttcgtcccaccactaccacgtccgtcactgccgcacgccacctcccaggccctatgagatttcgggacgatgtgctactaccgtgatccccatcgctaccacctcaaggaatgccgaaatccgacacttccctctgccttatgcctcactatacctcccgcttctatttcgtcgcctcctactatgccatagcttgcggtacgccgccgccaacatatcacaatctcatgttgctgcctccctcaaggaccatcggattttcgatactccccctccaacgaagttcgccttttttctcttctcttcctcagatccataaaatacagatcgctagtttctatgaatgtggagcgtaatactattggtgaactgtttgtttgttggatctacttttgacctataagtcctggtgcacacacatgattcaccttttgaagtaaaaaagcgagcatgtagcatattacggtaaggaactgatcgattgtatattaatgtcattttcagagcgtcgccatcgatcaaattaatcatgggtggaagacgcagaaccaaacaataatatacagaaaaatgacttttccctccatcctaaaaaatagcaatttgtattgtctaaaatttgttccatgatatagcaacttctccatctaccttttcattacaaacgatcgtaatcatctctcatcttaatctaaccgtctaagcataattaatttaattttatctacttttataattacttataaaactcagaaatccttatattttaggatgggtagtgtacttcactgcaattcttatgcagccatgagagggagcaatcgatggcactgttgcgcccgcacgaggggcccgcgagcgcgagatgctcggatgatcaatcgatcgataacgcagtgcaacgacggcgacgacacgtcctaatcagtcaaaaagccctgcagatcgctgaggaaaatcattagttcccatcgaccggctattggctactgatgagaattcgagagtggcaatatttaagctagatgggtagagatggacaagataatgtgatactacaacttgcacatagctgctctagaaagaaagagaaagtgatcgatcgagagcaagcatgggcaacgttcgtctcaatcctatatttcttactaccttacccatacacgcgttttggtacataaatagtatacatacaactccaaccattaagattcaaactattacaaaggggattgaattcttctctgttcaccacctctcgagcttgctactagctagctttgtccctagctgccctcttttttttcaggcacgatatattacaaggtaacttataagaaaaaagtccaaacctaaataaataggcaaatttttcgtttagcttttataaaggcacaagtcacccttatactgttaagctaaaactaagttggagtaacttttttttcgcttgtataaagtggaaaagtgacaccaccacaatgctatagatttgatttttgcggacaatgccctttccaggctacagacaggccgtaactgcctccgcatgtaaaaatcactttatcggggtagtttaaggcccgtctgtggtaacacattatcacagggccccccttaagagacccgcctgcgataatgggtgcattatcacatgagggcatcttaaagggccgcttgcgataatgcggttattgcaagcgggcccttaagagtcctgcccgcgatgatatgcccatatatttgatcccaacccgagctaaccccatttcaaccaaaagtttatctcttcaaaacaagcaacaaatagggtgggggaggttttgaactttaaattgatatacaaggttatatacttccttacctcctccatttgccgccatttttttaaaaaatatttcatcggtgcaatgcggagaattttgcagttttagaagacgactcttatgagctatttttgcaaattttaactataatagaatatttagatgagcaaaattactattgtaagcactagttttcatgctagttcaatgtaatggtgcattattttcgaggagatgcgtgtatttttcatgttttggtggaaaacacctatagtttaattttattcgtgtcgtgattatttacagatggatcagacatggatgtacgagatgcgaagaattcattcatcatattgatgattatttacagatggacgagaacagttctactcgtattgatgattttaaagctctttctggtctgggggatatgccacgtcacgctaaaccaaaggtgctaatgggttcagcgagaggattagataattaggagacgttagtttagtcagcgaaggatcttctttacgacgaatccaagggatgtgagaaagattttacgatattgccttcgatgcttgaacttctcagattgaagaccagacacaaatgatccgatagtagcttcaatggtttgttgggtctcttaagtgttttgcttcctaaacctaactaattgccatctaacacgtatcaagcgaagaaactcatatgtccaaaagatacatacatgtgtaaatcattgtgtattgtactacaaggaatatgtagacttgaacagttacctaacctgtggggctagtcggtacagaacaggtaatgggtcctctaatagagaggttgtcgaccttgattcatcggtgcatacaaagaaaaatattccgaccatggtgatatggtatctgccagtgaaagatgtcatgaagcgcttgttctcaaatcctaatgacgatgagttgatgagatagtatcgagaaaaccgcaagacatatggtatgattcgacaatccaccaatgctctttagtggaagacctttgatacactatatcaagaatttgctaaggagctgagaaatgtaatatttacatttaagaatgaacacttcagtgacttaaccagctcacatagctcatcggcctgcaacaatgaatctccccaagcagttgggcctcccgcatgcgaaaatgctgatttccgcagacatttgcgtgcatgcggtccgccagccacttgcgaagatcaattctgaccacatacaaaaatctttttttaagtagcgccattacacttgagggcttaaaagccaccagctcataaaccatataagaaaaaatagttgcttacgagtttaatccaataaacctaagcccgaatataggttctcctcatcttattggcttatcgacagtcaaaatttaaattttaaaacttaaatttatacttatgtattaactttggttgctttcttcataatttgacttgtcaaacgtagcagctcgactgctcgaccgatcagagccgtatataactccatatacaaattattgacacaatgacaaggcctacatcactatccaaagggatgaagtagacacctcgagtagatatgatgtatgcgaggctgcaagcgcttgtacgtgactacgtacgtacatacacacattcaatcagtgtatatggctgattcggacggttcgtgtagtgctacctaccatcaatatctccgtgcatacgtcagctcataaacagaaactgcttgctaatctctccatctccagtgcaacatccaacactcaactataaccagctgaccgattactatcaaggccggtgggcaaacaattaaatgtcagaacgatcgacatggatgcacgacagtcgcctcggccaaagaggcgcgcgcaccggtcgatcatgattgtactcgtccttgcctcagaacataaatgtactaaaatttgcctgagtgctactagagaataatcaatactacccctggtcataataaattaatctaatagcgagcgtgacacattttaatactatgaatttgaagttatccaaattcatagtaaaattaatgtgtcatatccagtatagattaacttatttctcctatttagatttatggtactatctactagattaacttattttgggacggagagagtactcgcgtagcttggactgcagtacaggtgatgatatatgtacatttcgtttgtcctttttcttaaaagaaagtgttgggttaaaatttagttttcagctacatatatctatagaattaatattaataaaagctatttgtaacacaccatcatgggacaaccaaatctgcataatgcatgctacattagtacacgaccttgtacgggtgaaaacggaacagattcggatggatagtggtcataccaaatcctaaagcattttttaagcgaatttggagtggatgcggatgcagagctgattgtttcggatgtccaaaatggtgcggagttggtgtggactcggtttggaaacagattaaatttatcggatgttatgtgtgtatgcaaaaaatacaccatcgagttagtaatgcaagggacaacaatgcaataatcaatgaacgacccatcttaataattatgtacttaagtaccaaacaatatgaatacatgatattcataatataaaaatacaactaaacaagtgtgatatagatggtgaaagcctcaaactaagaaatttaggttaattggtaaattaggccattagatgcgccatctcatgttatatgcaacagatagagtggttatatgggttaataatttcgaattatccgggaaacgacctatcggataatctagcagaaatgttggacaatccacgtccgtaggattttagagatatcatatccgcaaccgcatccatattcactagatttctaaaaacctataccatatccgatcaaattcagagcggatcagataatatccgatcagttttcactcctacgaccatgtgactatggcaaaaattttaacgggaaattttttaagtctaaactagatgccaactgctagctcccttcaattcgttcacaaataagtgtcgttctagaatctgtatagtcaaaataagttaactttgccaaaattattattagaatatatgttttgggcatacgaaaatgacatagaaatgaggaactaactagaaattagatggatgagcatacacatggatcggtggctgctagctagctataagatgaacatgggcatgcagagggatcgaggagaggatgatgataaatgagcagtggagttaggggagccatagaatgtctgtccaaataaaggaaggcagctaaagtgcgagactgagaagaagactgtagactaaagggggttgctagttacccttgcctgctgtgtgtggtcttgctagctagctatatcatgcatcatctgcaagcatacgaaccaatggtcattcgcaaaattttggagttttggctggtgcattgcctgaagtaaagcttgggcacactgaaccgtgatctaacatgtactgctcctgtatattgtgatcaccacgaatcctgtgcactgcatgcgcattttctcgatcgatctgcatttgcattgtattgcatgcatgcaacactgcatgtctatatattaacagtaacagctagctggttcttggctgcattttgtgtgtgatgggttagatggaggcttctaattggtgataatattaattagtactcctagctatagcacaaatgcatgcatatggtgcggaaagaaggaggattgtatatgtgcatctacagtttatgccctgggcacattgaccagcacccatcaactacatacaataaatctctatggctacatggaaatggggcgcagtgcgctagtacaaagtaggcttcccaatcgtcgttccgtgggctgggagcagggtaaagtaccctcagaacctatgcacattggtgaatatatgcaagtacgctgcccccctcatcgctgccgctgcaacgacgaaaacgagggagctgtacgcctctggtactacgttactgcatgcccgaggaccgagaggcagtcaggcacacataaggtaggcagaagggccagctgattgacactgtgtggacacatgtacgtacagcgatcagctagctaagcttagctagcagcactgcatatgtgcagctgctgctgcctggttcatggcatgcaacagcaccatctctgattcagattctgattctcatgacttgacagcaattgcacggtctatctcatcactagatcgaacgacacacatactatactgccactactactagatcgctcgatcgatcgatcgagacaggcgggcatgatatgatggtttatatgctacatgctcatatatagctagggcggtcaaaaggccgtggttttggtcgagaccatgatcaaatatgcacattaactaagcatgcaatgcgtgcaaacactgtactagctagcacatactccctccatccgtccctaaatatttgacgctattgacttttttaaacatatttgaccgtttgtcttatttaaaaatttaaataattattaattatttgattcatggttaaatatacttttatgtatatatatagttttacatattttataaaagtttttgaataagacaaacggacaaatatgtttagaaaagttaacggcgtaaaacatttagagaatggagtatatgcttacatatgtacatcggggccgaggccggggccatgcatgcacacacaccggtgatggtcggtcggtgtatgtgggggaaggcacgcgggcgcgcggccgggtgccccaccggcgatacgccggccggcggggcccaggattaaggcagcggccgggaatccggcatgccggccgccggtcagcaacgagggagcggccctgtacatggactggttgctccctgcatacgatgcacgcaacgtgggactagccagctgcacctgcacatctcatctatatgcattccagtagtaatgcaactagctagctagctaagcttttgtcctagcttgagaaagagatcgataggtacagcgtacgtacctgtgtatttctacatccactgatagtggaatcttgacggcgacctcagctcccagatagacgccctccccatcttctagcttcttttcctgttcgatccacaccggccgtcaatcttgttcagttttaccatctcacagtacaatgtttggaactttctagcttggattgcatgtaaaaactacacgtgactacatatcgtaggacgtgcatgtgtgtgtgctcccggaatgaaaacatgcatgtcgtttgttatgatatatcaatacttacttccacaaacattatgattgcatcctattttatgagtcgcaatctactacatgatcgagttctaagccctgattctaaaattataatctagcaactaacagaagaagagagcatgctcgttaggatgggagaagattatgagcatggcacaacattttggaacaagtttaatactccctaccttctgtattataaatctctttgacttttctaaagtcaaacttcttaaaaatttaaccaaatttatagaaaaatacagcaacatttgtagcaccaaattaattttattaaatctaaaaatgaatatattttgatagttgttatgttttatgttgaaaatattgtcatatttttctataaatttagtcaaaactaaataaatttaacttagaaaaaatcaaagtgacttataatatgaaatagatatagtaaatcgatatatcaactagtagctatatgtaatcacatatatagctataatccactcactttaccattttgtctttataatattaaaatatacctatgatatctacttaactttttggagctacaaggtgtatacacactttaccattttgtcttaatctcacatatctatttaatttgtttttctaagagcacatgctaagatagctcttgcatgatagccagctcttatattttcatgttatctctctccgtcacatgtgcaaagtgtgatgtaagcaggaaataagctcaccaaaaattcacaaactccatgtgtatggtctaaggtccacgtacatatatatgcacgggcgctgtatgatgtggactggtcatcctcagttttgaactgtctgtatgcatgcaagccattggcatgcgacgacgacgccatggcagcatggctgactcgtgcactggcactgacctatacgaacagtattggccgggttccagtaacccagctagaagctagcttgctagcctggcctcgtcgtgctttaattccaacttccaagccgagttcgaacagttcacttcttcatctccatgcatatacatggaccagctgcgcttctactatccctacggagtacatgccaacagccatgcacctacatttgtatcttgcttctgttctagacttctaatcgtgtgactcgtgcctacggcatgtgcatatgatcagtattcatgtttattaagggctcatttggtttgatgccctaccaaatcattagtagtgctaaatcatggataatatttggcactaccaatattttggtaaagttggtttataggaattatattaccgttggtaaattttggcatcaaaccaaatatctacaaggtactatttaaagtgccaactatttggtagggaaaattttggcatcaaaccaaaacagccctaattaacaatctatttaattaggccttcctttggaaggccatgaatttgcgcaaaaaaaagaattactagaagtttaattaattactagtgatgacggaaagcaaaagaaagaaagcaagctatgcataaaagttatataggtatgcatgctgatcgagtggctgcaaaagtgaggcgaccagacaaagaaagtagttctacacaagttcgagaggagaggagtagaggattacctttattttttctttttacttctctctagtgattgatgactgaatcctttttctttttctgaaagagtcgcgactggaaatttgttgctagtactgatctgcaatcgtatcaaaacgaacgaggggatgcagctttaatcagggttccaacagacaatatacaggcaggcaaagagggccaggggaggaggacagcaggggcagaggcacgtgagacgggggaactaaccgtccaatcgctcagatctgacggctcccagaaatcaagaggggagggccccggccacggccaagagacgccgcgtgcgtggatcacgagagattgattagcagcaggatgcaacacacaagcaaagctcttggactggacgagaagacagaggccgaacaataatgcagccaggaattctgccgtctgcaatccactgggccgctttcattcttcgcttcacgagcaaagctgcagccgcagtcaataacagaactgtatagatacacctttatttgcctgcattatagaaaaagaatattaggcgataccattcatatatctttttgtattggtaaagaaaatggcgcaaacctgacagatagagcaccaacagatcagaacaatgtaagcaggacctcccaggttaatagagctagctttacaagttcgccaagtaaaacaatgcaatcaagggtcaacagcactacagtagagggaagacaagaaatgcagctgtttcattaagaagcttaaattggtagaaaaaagtaggtctgcacatgatcaacacagaacagcgtaaagttgttaaacttactaatttacattgttaatctatctaaatggattggtattgacaaaacaaacgtggcacacatgtccaggacatagttgagcagaatggctcaaatacaaggtcagactctgtcgttaatggatcagaagcagaccatgttgctcaacagttcaaccaatttatttttactcgttttttaatagcccttgattcctcaagatttcgcaagttctcttagctccagaaccttgaaagagcttatttatatcagagcttctgcacaagaaaattccatgatcttatcatgagatacattgctaccagtaacatcagaaagttccatcgtaaggtttagtatccgaagaatcagattaatcatcatctggaataatgccaaagtcatccaaagacatgttttctggtcatatttcgtatggaaaaacatgcctggtgatatcttaccttttagatcagcatcaaccatgctatctgtgattttcaatcattgccattgtcaatcaaccattgcaataatcaatcatgctatctgcgacagacttgtcattatcaaccatgctatctgtgatagacttggcatctgcaactgcatatcgccattggtaacaacaggctggaacctcactccacgaacaagagaccttcgcctgcaatttggagttggccttgtatgcagtaggacgttcgctcttcctaaatgtcatttttcacaccaaagatccttgagttctgttaattcccagaatcattgcctctccacgtttcatcagaactcagttctttcccatcgttgatcttccttttgagttccatgagtgtttccttagcaaattaaggattggatcaacactgcccctctcccactgatcttctgtaggttcaggccttttgtgctccggatgttgacctcgctcacagttgtgcctggatcatttcaaatagctctacaatcttctaccttatccctggagttgatgttgccagcgggcgtgaattgcttgccccagaggacagagatggctggaccacctttggagaacactatataacaatcaaaatcataaatgttctcacagtcatatatatttcttggtaaagctttttttttcccaaaaagcaggccatctttttgttgcctcgatatatctgaattccttggcctattattgcttgggttggcacaacataccaaagatgcattcattgaacccagcattggtgatttactcaggaaacaagcttctggagggaacctgcaatatctatgatgttggtgtgtattgctcagccagaaacacctggacagaaaaatcactgtacattagttattactttctatgaagcttgttgggtaatggaaaatacacataatactggtaaattgaacagaaaattgcatgcttacaaagaaaactttggatcaaactggtcaaaagttcaggtcaaggtttgcatgcaaaaaaagaccaaattgatgcacgcacaaaagcaacttgtgataattcaatgtaataactgggccatttgatagtagaaggaaaaagaaagtctagtatagagttatctcgtacaagtcaaattaccacacatgccctcaattaccttcaattcagacaagtcgcaagtgagaaagaaacatactacgaaatgaactccacccgacaaggtagtggtggatcctgaatagacgcatgtgatgggcttaaagattacaagacaatcaatgttgcccatctgttcatctgcaatatatgtacagtataacgtatatagttctgcatgtattcatgattcagcgagtaaatgatcccaattcaagacaacacatttactgacaagaagaagaaatgggtgaacaacaattaaatttcacatgagaaaatcaggactgaaaatggctgacagttccactatgcaaagccagctttggtatcacataaattgcaaaacataaagctggcagggttctaacagatccaaaaaatgtggattgagggaaattaaacagtacatggcatcaaaaggataagagaaatggactagctcaccaaaaacagaggcagtaaaatggtatggcagatgagattagcgtgccatgaattgcatacatactcggatgtgatagtttgcgaaactgatccatttaacaaatttgctgttgaatacaaaccacgatgttaaacgcatggggatacaattctctgttgttaaggactacaatgcaacattgtcattaaactgctcagttgaaaggcacaagctggaatagtggcagatccaatagttttgtgaggtagaccaagcttaactacagtgattttttcggcgaaatctctgtcatcaaccacctatggccctatggtagcacaaaagaagagaccaagctgctgcaacacagttcttcctctacgaaagcccaattatagcccttactaagtaaggaacacagggtcccttcaaaatttcacaatctacagaactattgactagtgctactaaacaggcgcctaccagggattgaaatttcgaaaacctaactaaaattggacaccgccgcggcccctccgcatttgtatgttcctaaccgcaaacagcagcgaaggagaggggggagaaggtggagctggcgacgccgtaccatggcaatggacgaggatgtggaggtcgtcgcgccggcggccgaggcggtgacccccccgcacttccgcagctgcgtccccgccgccgcgcgaataggcggaggcggcgattttggcgagggttttgggattccggcatgggaggggagcaatttcgccgtgcgccgcggggacgtgggctggcagccgagcagttctcgagttgggccgggacgggattgcgtgcgcgtctagttgggccgtatacgtatgtacgtacgcgagtagttgggccgagctcccgcatttgcgggccggccggtatagcgcgagttcgtgcggtcgtcatcgtcaacgcagctttgtgtttggtcttctctaacctaatctagcggatcctttgctctacattttgtcttcgtccgatagtcctcaatacacaacacaacttgccatgtcaatttacgcaaggtaggttttcggtaggacaataaaaaaatttcatttttggggtgaacacgaattttcatcgctgctgaaacattggaacgaaacaatagcttacaaggacacaagcattactgcactaaccgaagaccgcgcttgtataatcttctggctttcatctttcaaccacgaaaccgtcaatccatccagagagcaacgttgctttacatggtactccctctcccctaaatattttgacaacattattttttaagcatatgtttgaccataaatcttattcaaaaattttatgaaatatgtaaaactatatgtatacataaaagtatatttatcaatgaatcaaatgataggaaaagaattaatgattacttaattttttaaaataaaataaacggtaaaacatgtttaaaaaagtcaacggtgtcaaatatttagagacggagggagtacatatgttgttggatgaagcttaattcaactcgaggagcgaggaaaagtgaaagcctgttgcaaagacttctttggtttgtaggattttcaaaacgtagaaatagggaaaatggaggaatagtatgggaatacatgtgtaacctaaggattgaaaacataggaaacttccctatggttgtgtagcaaacaatccaaaggattgaaaacattgaattggagtggattattctttcctttgttttccctctaaaagtggagggataaaaatttttttcttaggaacatatcctatgcatacaagctttatatgcacactccgtgcacatcaactagcaaatatcataaaaaaaattctagaaaaaattagagatgtactcctaatagtattacactatctacaaagtctcatattcaaattcattatattttagccgtaacaaataagtgaaaatctgacagttttaaggccctcttagtttaggcttataagccaaaaaatctaagcctaaacaaacaagcagctttttcgtttggctttttgaagccataaaccactctaacactattaagccaaaagctatattggagaagctttaatttttgacttatatgagatagatgtatgactccaccactaaatttaggacattaaatccaccggcttataaattatataagccaataagttgacttaaaagtctaagccaataaaacttaaacctaaataaagaaggcctaagagataaaatttgtcagaattttgtcttttttgtcacggctaaaatataataaatttaaatatgagagtttgtagatatgtgtaatactattaagagtacatctttagtttttttttctagaattttttgtgacatttgctagttggtgtgcacgaaaatttttttatgtgcttaggatatgttcccttttttctttggtgcatttctttgaaacaaatgtcaatacagtgttcatttcaaaggattgcatagtcctgcacttttcctttacaattcgtttgaaacgaataagccttttgaaaggaaccgaggccctgatgaccttccaccagagaaactagtacgaagcgtgtacgattttgtacagtactagtttgggtttttttgtttacgtaaaaaaaaatttgacgcaatttttttggaataatcacaggagggagaggttcccacctgaatttccattaccatttgaagaggtttacaagtatagagttcagacgtaaccagcggcacgcattacatgtgtagagaattaattgcgatgttgaaaatacatttccaggttatagcaactaggcgatcgtcgcgcagaagaagtcgttctgtccacagagtagtctcatccttacagcggagaagaagccgatgtaaggatgattgctggtcagagaagacaacttcttgtcggtgattccaaatactccctccgtctcaaaaaaaaaagacaaaccatgggtttccgtatccaactttgactgtccgtcttatatgaaattttttataattcgtatttttattgttgttagatgataaaacatgattaatattttatgcgtgacttgtctttttaatttttttcatatttttttcaaataagacggacagtcaaacgttgggcacggaaaccagggtttgtcttttttttttttaaggacggagagagtactccataggcaaagcagatagaaggttttgaaatgtgcctgcggcagattgtttggtagagcaatcaagtgcaggtcatgagtgtgcacgcctccaggatatctgtggattgaattccagaagctgaccacaaacgggcataggaagcaaaggtggcttgaagtttcatcagcagactgacaaatagcgcacaacggcaattggatgattgttttcttgtgaaggttcttgcatgtgggtagcctatcctttgtcagtagccaagcaaaaaattggaccttggggagtgccgagtttttccatataaattgttcgttgatgtccatctgtagaggctgatgtagagcagactagtttggttttgaaaggctcaaaggttgatttcttccgttgactgtggacaccgggttgtgaagtacgtatgctttataggaagtcttgtatgtgtgcttgttttgttattctgatgttcgtgttgctgtatgctgtgtgctataagattgttttgtgctataagatcgatctgttgatgactgatacaaacagtgcccagcacgcaacttttattggaaaactaagcatcagggttcacaattccaacgaaaaccggtcgaattctacgaaatttcgacgttttgacatggctcggaattaattttcgattggaatttcgaagggtaaacagtaaatttggtcgaaattcagtcaaaatttatcaaaaaccggtcgaaatttgtcgaaaactgtgttatcaatggaactcaaaatttagtagtcaaccaatagtatacaccctgctaagcatcttatttgtcgacgaagcgcgtgcgtcaaaactcaaacaaacaacctcttcaacgaaagcacctagcatgcaatttttaacccccctcccccctcccaaagaaaaatctccaatcaattaattaattatgagcgtgtacaaatctagatacgtcattttcattttgagaaaaaaaatcctagatatttcacctgccagctatagtctatttataaaatgagtaaattacactagcggtacttaaacttgtaacgaagtttcacttaggtccacgaacttgcaaaacgtgcatcgagatctctaaacttggtttaatatgtgtcacgcccagaaatttagcccaaatttccagactattttgtgtattaaatccctgtccaggaccagccagggtacacaaaacgacaagtaatatacagttccaaacgtaaataaagcgtaaaatacttacagaagaggcgcttagtcctcacaccgaaacaaaagcagcagcagcggggcttcagctccactccacaggcaaaactcaactggggtctgagccttggtcctctaacttcgtcttcagcccagaagcactacgcttctgaaaaagggggaataatagcaagattgagtacaaccaccgtactcagcaagccacaccaacgatgcagacgtgcaaggggatccaaggatggtttgtggctatttgcataaaggcggttgtaaaacattttattgagcaaaacagtaaaactgttgagtaattaaagtaacattaaatctccactgatcaacgctacaccacgttgaacaggcccaaccaacccacctgaactacagtgcattgggtcgatttattaggggtgagactaatcacggtgaatctggtcgatcgcccataaccgcgggcacggctattcgaatagttttactctggccagaggtgcacaactgtacccacaagacacaacccaccgacatgtcaccgcgtcatcatgtgcccatgatgcacacgtcaccatgtcgagtgattgtgacgagacccttcgcataaccctcccctaaccatccacaccacgctaaggtttcacccccacccctcaaaaggcagtgggcggtcccctcttgcgccgcggtgaatccggcagctggacaaccggacaccccggccgacccaactccatcacgcccaccctcgccaccggtgcctaggaaagggtcgagctatacttcagatcaagcagttacccattcccgcttgtggtaagcactgtaagtcttccagggtttcccgtgaaccggtccttaattgccatgggtgcgactcacaaaaccatgcacccacagcccaccattcagtcgcattttagttggataattacgaccataaaacatggccagatgtctcgagcacgcggctcaacaagatactagaatgtctaatactgcaattatcccatcgactgagctagtggtaattaagcatggctaagcatatagttctagctaggtcacataagtaacacaagctagtcaatttattacccaaggttgacaaaggatagatatcaagtaaacatggcacaagcgagcagataggtaatacccggatcccatgtaattagcaaaacatgcatatttatttgtaaacggtaaaacatttataaattgggatcaacatgctcaaggggaatgtgtgacttgccttgcttcttcactttgatcttccgaactcttttcctcgcgaccgcggacttccgaaacgacggaaactacacgctggcacgcaaaacgaggaaaaactctaataaaaaccaaggaaacagtacataaaaagtaaacaaacatgtagagctcaattttagatgaattttgcaagttgaatggctcaattcggagttcgaatgaattagatatgaattttagaagttttgagccatttaaatgaatttctagaattaaactcgatttattgcgcaattattaattatttttacaaaggaaaaaggacctcgctgacgtcagcaaggggcagccggcgccgacacgcgggccccacacgtcagcgggtcaaggagctcggtgcaccgtggaccgggaccacaaggacggtccaccgccggtccacgggatggacggcccagatcgggccaagccgatcgggcagctgaggggagtggtggcagggcacgggcacagccagggctggcccgaccgaccacagagggcggcggctagaggcgaccggagctcgccggagagcggcggcgcgcgggagcggcgtggggagagcgggagaaggcgagggaagcgccggcgaggaggggaaacgagagaagggagcccggggatggattttataagctcggggagggaaaaccgttgccgggcgtggcggatttggggcggcaatgacccgcgacgtgggtgacatcgtgggcgaagtggagctcgatcccggcacaatttttgggggaaacatggggagagtgtagaggaggtggatgggaaccgatttcatgcggtttgggcgcgagggcgcgagcggaagaggccggaatcgtgggcgacgtgggcggcaatggcggcacagcggtttggatgagggaggctggaggtagaggaagggtctgacaagcgggtcccacggccccacttgtcggcctgaggggagggaggaggcgcgcagggacgcaaagcagacttggggaggggaggcgcgctgggccggcggcccgaggagagaaggaaggagggggaggaatttgggccgagcccgaaagggaggaaggggaagaaaggagaattaaatttgttttctttttatttaattggttaaatgatctttgtgactttaaaactatttctcgagctccgaaaattcacggaaaattccggagagtattttagggcacaaagaatattgcaaaatattcccggccaatgatttttaagggaaaattttaattctcccattatttcacttggataaattgatttaacttttatttaatttctagaaaatgcattatttaatgatttttaatcccgaacgaaaatcggggcgttacaaatctaccccccttacaggaatctcgtcccgagattctgggatggctagaaagaaagctggtgctggtcggcggtctgactgatctgcacattgaactgccacatcctgcttcgaactgattgattgactggttgatcaaacctgcacgattgaactggctggattcgacctttctgttcctttgctttgccaaaactggaccgactggttctgcttgaactgacccagactaggactgcggatgctcctgaaacttacttatcttggactgaactgttgaggttggcaattttggtagaattcaccacgctggctataagaggatgaaaattgaatctggcatttgtaaatcatttaccctatgtccgcttcgactggtcccaattcaaatgacaagtaattccaggaaaacctgcttgacctgcctttcgtctgtactacaactgtcctcgctgttgcttttctaagctaaactgttgacatgcttcacaggtgtaccttagaatcgaacctgtcgacctgagattggggtgactctgctgacaccttgcaactggcttcttcaagtactacccggattgttgcactgggttgaaccttcaactaaaacagcgacgaagtgagccaaaactcatctccgagacctacccccttacagggagtagtcttactttctcctgactaggaacaattggactattgtccttgaaaaataaccaacacttctcttgcttacaaaggccctcactttgaaaactgaaacttcaccgattcatcaaaatagagtaatgacggcgcactttcatcccagcaagatttggaacttaatcctcagttgctgatgggagattccacataaaagtgactctcatttagctcagggacacattgactcttgactaactttcccataagttctaactactggcatgactgtcctgcttctagcttgacttcggtgtcgagttgcatagttgattcctcaaaactgaactgatcgactctgcattggaactgacacaacttgaggagttagggatgtgatgacgctgacgtcttaccggggaacaaccctctaagatgtgccctgtcatacatcttccatggacactttgcaaaaactgcgcttgaaaaccataaccacaataggtagcatatattactcctgggattggtggtggcttagctgtgctgatttgctgaggacttggtggcgtactatctgaggttgcgggtgcttcctctttgaaaacaaactgactatcgctctgatcctgattccggcttgcatctgagcttgtacttgttgttggagacactgttgttgcatctgttgcatcggactttgcatctcccgcatcaatacatccatcatctaatcttggacaccaaatgttgatcacgagcagggttcttctggcactgggataccttgtagctttcaactgaaccattgattggtgactttaatacaccgtcgttgctcttctctctaacactgactatcttctgccagggcggaagagaggaggaagagaggggttgctaaagataaggtactaaaccacttgcctactgatctgtcgtgagtagacttttattcttcaagttgcttaagcaaacaacctagtatggtcgcatccccaccaatgatgcaaaccatacccctacacacaagcaaacaacacacgatctagaaagctaacggaactactcttctgggaaagattgggtttaggtcatctccgagaaaacatcacttgatcttcgcagaacgacgactctgaactgatcttctcgctccttgcacgaagcttgaggctcgaattgacttgacttccgaacagacatgaagctgacagctggtcctctaggtttgacaactaaaagaattggagagactgggaggagaattttgaaaaactgtttgacaaagaattgccgaagggcgagaggagacaatttgcaaatagggttttcagaaaacttgtccttagggtttgaccatttggctcaacctacagtcgagttggctctgataccactttgtcacgcccagaaatttagcccaaatttccagactattttgtgtattaaatccctgtccaggaccagccagggtacacaaaacaacaagtatctcgccgcgccgccgtccgccgtccatctcggcctccccttcttcctcctcccgccggcccgcgtggctgccacgaaggcgccacgtcggcgccagctcggccggaccgggtcaagctgaccccggtaagccgctccctccgtctcccgctcgcgcgcgcggtccaccgcgagccgtgaggctgcgcgtgggcccgacgcgtctcggtccatccggcgcaccgcccgtgcgccatccccaccgaaccctagcgccgccctcacgtgcgcccatcccaccgtgggccgtgtcaccgacaagcgggccccacctgggacccgcgaggtgcactcggtccaccggaccgctccctctctcttccgcgcgccctaatgggccgccttccccgcgcccacgccggcccaaatggctcggccgagcctccttcaacactcgggctgcgcccttgccgcccgaaaaagtctaatatacatccctcgtccatttccttttccataaatcaattccttattattccgaaattccataaatcaattcctttggtcccacacatcagtgaatgtcaataatattcttgagaatattatttctataaattccataaaccattccttacattccagaaaattctgataaatcatttcctagtctggaaaatcccattcgagcttccaaaattcatatctctcaatccgtagctccgattgactccgttcaacttccggtactgccgtaaaattgagatatatttaatggcactattaattagtctaaatagggtctttcttttggtctttcgtttaggttttgattgtttgcgtatagccgcggttaccggattttcgtcgatcagggatttctcgtagattcgtgaagcttcgtgaagaccttgagcaaggaaagtcaccctttgatcaatttctcctataattggaaaatcattattattttgtttgcaacttgcatttttagagtcacacacatataacatgcttggcctcggtttgcgtgacaaaccgacggacctacccagtagtcgcactaattcctgtaggttgtactaccctgattccttgtcgctccatccttgtggtacttcggtattcgtgctctctgagtgcgtataccaaatattccacatacaccgtcgattgtcgaaaatttgggaaatgggtttgagaagccttgaaaacccgacatgtggtgtcggtgtgtttgaaaataaaatgaattgtgaaaattcgcgatgcgggtgccgtgcctatgtggcactgtctcgtatttgcatataaggaccaattcctgtgggaaactcatcaagcataacaaagtgcaaccacaaggtggaatgggacaccctggctaagtaactagtcggttcagggaaacctcgcatgccaatagttgggaacgccggggcggggtcgattggagccaaaccgggttcctggtaagcaagaaagagaagcttgctgaattaccgatcgaggtggttggagtttgatttgtgaaaactaaaatggcctatatttatgtgaggatttgatccttctatgtggcatgaggtatccctgggtcggcttgggaaaggctttgttgcgaacctccgataccgacgggtgttcggaataagttcgtatcttgtgggtaaagtgtacccctctgcagaggttaactaactgttcgaacagccgtgcccacggtcatgggcggatgtgaggtggttcccgttgcgtagatttgtttgcctgtgctttgtgaaaagttgttgtgggataggaatcgtaaccagaatcagcctatgtggcagatggatggcctgagtggtcagaaacgaatctgtgtgattcgggatgtctacgggcatcatagactaggcttcccgagtggaagcggaatgttgtgctgctgggcagctggactctgggagtccgagaaaatgaataaggctctgggagccgcttaatcaagtgaaatggctctgggagccgagaagtaatgatctgacccgggaggtcggtcattatcaattgagttgttgaaaaacatctcttaaagttgaatcgagacgcaagtctcttttcgacccaaacctgaaaagaaataaatcacttagtggtttcaaaatggatttcaaataaaagatttgcaaaacaaccttgcctctcttccaagcttgcattaaacacctaaattcccgtggcttgttgagtacgaaagtactcacccttgctctatatatgtatatatagttcctccgtcgtgaagtgaagatgaagtgaagtgaagattagggtttcgtcctggttcccagccgtcgcctgtggcgttgggtgttagtccgttggttccactgctgctgctgttggtgtttcctcatccgtgacgtcggttgcattctcgggctgctcttggttccgctgctgctgctgttgttggtgtttcctcgtccgtgacgtcggttgcattctcgggctgttctaagctgcaacctaagttaaggtaaataagtcctctatttattttaaggatttgcaatgattcatatttgtcaccgtgggtaccagcactatgtcctgggactggtaacgagatcgcggtttcgtaggaagcggttcgcgccgttattcctacgacacgctcctatcaggtgccgttgtacggcggtgccggattggggtgtgacacatgctgcgtgaacgatgacatgaattttttttattttttcttccttcttccctcttttttcccccttcttatcttttttttctccactttgcctccttcctctcccttccgcagtatttttctccacacgaggtgaggaaggagaaaaaagatgggaagaaaaaaaagggaaaaaatttagctatgtcatcgtccacgtggcatgtcacatagagaagaccacggttaaactaggctttggaccgggatgatacattaaaccaagtttaagaatctcgatacgtgttttgcaagttcgtggatctaagtgaaacttcgttgcaagtttaatgaccgctaatgtaattaactcttataaaattgtagcatccggacattaagcaagccatttcagaaatggctaccaataccctgcacctgcaggcgattgcattagcagcagtcttgctcatctgtcgcctttcgccggtgacaccagcagcgtcggctcagcagctgacaggctgccgcgacaagtgcggaaacatcaacgttccctaccccttcggcatcggcgcccgctgcgcccgcgatgaaggcttccagctcaactgcgacgacagcgcgtcgccaccgcgcctactcacgcttcagttcgagcaacacccgcagctcgtcagcctgtccctggccgatggcgaggcccgggtcctcctcaaaccggaaagcaagtgctaccctcctccagaagagaggtcctccgacgtccccacctcctcgtacacgtccatcaacggcagcaccacctaccgctactcgccggagaagaaccgcctcgtcgcgctcggctgccccaacctcggctacatcgtcgacggctccggcaactacgtcagcggctgcatgtccgcgtgccgccgcccgtcgctgggcaatgatacagtgccgcggttgccggggcggtgcaccggcgagcggtgctgccagagcatcataccacctaccctcaacttctacgtgccgcggatgttcaacttcgagaacgggacggcggcggtggacaacgagctccgcggcggcacgacgccgtgcaggtacgtgttcctggtggagcacacctggatcaacaccgtgtacaacgacacgaaggatttcaaccggagcgacttcgaggccgtgcccgtcgtgctcgactgggcaatccggaacgtctacaactgcagcgccgccaagcgcaacgcgacggactacgcgtgccggagcacgaacagtgagtgcttcgacaccatcgacggccagggctaccggtgcaactgctgccagggctacgagggcaacccctacctcgacggtggatgcacaggtagcagtcatcttaattaactctgtcaattaatttccatagattaatttggctgatgatcaaatatgacgaaattaattgctttgtgaatggaagatatcaacgagtgcttacgtccggaaaagtacggatgctacggagactgcacaaacatgttaggaagtcacacttgcgtgtgccctcctgggactagtggaaattggaccgacaggaacggttgccgcccaaaggacaacttccctttagctcttaaagtagttacaggtaaaaaaaattataactgtcgtccatcatgaaaaattacattcagtctcaaaaatggaaatctaacggagtaatattgggtatacaatggcgtcgtgttcaggggttagcgtcggtgtcttcttgtcagtgttcatgtgcttctggctctacttggggctccagaagaggaagctcatcagaacgaagcagaagttcttcgagcataacggtggagtgatcctccggcagcagatgcactccggcggaggcacccatgggttcaggatattctcgacagaagaactcaagagggcgacccacaacttcgcctctgaccgtgttctgggtcgtggtggtcacggtgttgtctataagggcgtcctcgaagacaagacagtagtggccatcaagaagtcgaagatgatggaggaggccgagaccaaggagtttgcgagagaaatgttcatcctctcccaaatcaaccatcggaatgtcgtcaagctgcttggttgctgcctcgaagttgaagtgcccatgttggtctatgaattcgtctcaaatggcaccctctaccactacatccatggcaaggaacccaaagctgacataccacttgatactcgtcttcggatagcggcagagtcagccgaggcactctcctacatgcactcatcggcttcacccccaatcctccatggagatgtcaagacggcaaacatcttgcttgatgacaagtttaacgccaaagtttctgattttggggcatcaaagctagcaccaactgatgaggccgagattgcaacgttggtgcagggaacttgcgggtacttggaccccgaataccttatgacatgccagttgactgataagagcgatgtttacagttttggtgtcgtcatgctagagcttctgacaaggaagaaagcattgtacttggacgggccagaggaaaacaggagcctggtgtcatgcttcaccacagcaatgaaagttggtcgccatcaagagctactagatagccaagtaaggaatgagatgagcgctgaaatgctagaagagatcacatacctcctgatgcgatgcataagcatgaatggagaagaacggccaacgatgaaagaggttgctgagaggctggagatgttaaggagataccagcagcacccatgggctgaagctgaagacaatgcagaggagattgagagcttgctcggcagggaacaacagaatgcaaattaccaactcgagcaacaaaatgtcttgtatttggaagaaggccgtaactatacatttagcatgtagatcacgctgttttgaattatgttttataaatcaatcaacacagatatgacttctttttctatgaacatgaaaaagcaaatttatggccattgcagaaaggacaaagagtttgcaaatgaaatcttaacatgtaaatctttcttggacaattaatatagctcccatgcataataaattgcaatgaaagaaccatgtagaaattcatgtgggatgtaataagattgcaggaaatcacaaaatgatatagaccaacgatgttaggaaataaacctgaccttgtgtgtcaggtcagtccgcgcgtgcgtcgtgtgtgtgtgtttgttgttaacgcgttcgtcgcatggagccgggtcgtgcgggtagtgcgagcaaaggtcggggatggagttcgtgctccgttgtgcgtcgcgctgggcctataaaagcacatgttcatcgtattgttggccaccgagttaaatacaaaaaaggcggcatttgttgccattgtcaagcatttcaagctctgccacttgctctcgcgttcgtgtgtgttccaacgatccttgtgtgattccaacaaacgatatgtaactgtgtaacgttaaatggcacatgtacattctttcttgaagaaaaaaggtgaaagagacatggtataaagacaaatcctgaccatttgtagaaggctagaatagatacatttaaataagaacataagggatttgaaaaccatctctatgtatttcagatttatcagccactagaataaacatatttaatgagatagtcaagttaaatatgactaaataagaaggtaagttgtgcattcatggcgcattaaacataaaacacacacgtatattccacaaatatttctttacgtacctttaaattggagaggtgtgcaatgaacttccttgacagatgcctaattcaagcctcccatcatgggcctgttgacgaaaaaatcgaacacaccggcctgggagatctgcttagctccagtgcaggtccaaaggttgttgagatgcgggcgtgccagtcagtttgatcctgcaactgataagatatgcaaatagtatatcaaaatagccgattggctgacaagctgatggagcaatctcagccgatgccgataccagccgatagcgatagggttttagcaatcggctatatgtccaatgatataaaggcaatcggctgatgatggtgtaataaaataacaatataatccaatataaaccaatcggcaaataattatatgataaataagcatcgatccgaaggttaaagcacacatcagctggaggtccgatgtcatgaaatccacaagattagattgaacagtgaaacctttgttgtcatcggctaaatccaacttatatgtatacgctatccttataagccgatgcaacgtccagataactcaccggctgaaaccccgatgaaacccttattggcaatcaagaagcaggctagggattatggttctaagcacgacttagtagatcaaactcaactgatgcagcactaagtatgaaaagaaacataatatctagacaatcaagccgttgactgagttttcagggtggtagatatctaagctaatctaacctagcaacacgatttagccgataccggcagaaaccctaaaacgagaagcagccgatagagctaaattgatatgctaagactagattaacataaacatatgataaataggtaggcaaatatatcatccaaaccagagcaatccaagaggtcgaatgcactgatgcagccttgaacgacaccgacgtaaacgatacaattgcctgggccgacggaacattggacttaccccttcgccggagatcgaacaccgatgcagccctacgtcaggtgccaagtcccgtcggacgataaaataaagtagaaaaggtaaaaggtggcgatgcgccgaattgtattgatcgtgaagatagattacatagaccctgggtgtacatatttatacctatgggttgatacaagtccttgtcggacaagaaagaaactttcctaaagataaaaggaaaagataaagtccttataggacactgtcggtgacatgggatcgggagtatcatgactagaggtttgaggcagatacaatcgcccacgtggcctggcaccctcgggggacgtcgggcccgagggtgatgtgttcgccctcctcttagtccccccgagggggtcgggctgcacccccctcggccccgagggccgaggcgccccgacccctcgtgggttttcgctccgcgtgtatggggtaggtgagcacagtggggctcacctaaccacatttattgcggtttggctgagcgtgtcacgacgcatgtaacgtagtgcattgcactcatttatccggtctgtgaccagtcacagaccggtcagatcgcgggttaggtggcgacaggcggtctgacgcacgcctcgccccatcccgtcaggacgagggcttctaggcgctcgtccccagctggagctagcgtgttacctcccagagatggcacgttagtcctgaccagatatatgccaggcttcatcctaaccattacaagcaaaatgttgtctgaagaagggcgaacattttgattgctaagctgacacgtggtggacaagaatgaccgacgtgactggtctgactccggtcatgtcgtcagcaggcggccacaattccacgacgcgtctgctcccggcgaaagtggaggtagttgtgggccgtcccatcagaaggtgactcggacggcaaccatgcaaatctccgtccatttatgaaaaggtagggtaagtccccaatgagaaggggggatggtgcatgtggtatccccttaagatataaaaggaggaccttgcccactgagagaggaagagagctttttcttggactggacctttccagattaggaacccagaacaagggagaggctggctgatactttgtagctctttcatacacagatctcccaaaacacaggagtagggtattacgcttctcagcggcccgaacctgtatacatcgccggtgtcttctgtgcttcctgtctcgcgaaccttccacatacagattgagagcttagaatctcacccagggtccccggccgaaccggcaaaggagggccagcgcggtctcccggtgaggagccccacgctccgtcatctggcgcgccaggtaggggactctgcgagtgatcttctgagctcttgcactctttcgtgtgcaccaagcttttcctgtttagccttatggctgagcaagcaaaggcgcacgacctctctccgagtgtgagtggcgacgacggggagccgaacccacgccgtcgagctcgtactccaccgccccctccacgccaaagtcctaagcagggggaggcgctcgagagggccgaaggatccgcgacttcgacatccacaggaggtggaaaggggcggcgagatggggaccgtcgcctcctcgtctacggcgacggcagcacgccccagggcgcgctccaagctgcgggtgcgctcctgtgtcacccgcctgtcgcccatgacccggagtctccagcccaacgttggctggacgatgtggccaaattggtcatgactgcacggcagcgcctagatactggtgggcggtcctccgccaccaaggcctctggtgctgctaccaccggctccgcgtcgtcaagacggagggcacgacgagcggcagccgctgttcgccattcggccgccactccttcgtcgactccttcgacccgggaagatctgcgtggggggccggacgcccgcgccagcatcgagcgccggcgtaatgaccgacgtgctgcccacgcaacggagggcgcttcctcgtctagagtgtcacctcaacacggacgcggggaccagccctccgtgcccccggttggtggtgtcggctgtagagcctttgtggcgagtcttcggaatgtccgttggcccccaaggttccggcccaccatcgccgaaaaatatgatggcagcgtcaaccccgccgagtttctccaggtctacacgaccgggattgaggccgccgggggtgacgacagggtcatggcgaatttctttcccatggccctgaaggggcaggcgcggggttggctaatgaacttgccacccgcgtcagtccactcctgggaggatttgtgccaacagttcaccatgaactttcagggctcatatccgcgcccaggtgaagaagcggacttacacgcagtacagcgaagggatgatgagtcacttcgctcgtacattcagcggttctgtcaagtccgcaacaccataccatgcatccctgcacacgcggtaatctacgcgttcagggggggcgtgcggcacaaccgcatgctcgaaaagatcgcctccaaggagccccagactaccgcggagttttttcagctcgcggaccgagtggctcgcaaggaggaggcctggacttggaacccttccggttccggtgtggcagcttcggccgcccccggatccgccgctcagacagggcggcgtgacaggaggaggaagaagaggtcagtccattcagacgacgagggtcatgtcctcgccgtcgagggcgctccgcgggccacccgaaaggggaggcctgcgggagacaaaaagaaggaggccggcgctcccagcagggagcgcccaaccggcaagtggtgcaccgtccacaacacttcccttcacgacctcgcggactgccgtgcagtcaaaagtttggctgagcggacgaggaagtgggaggaggagaggaggcaggagcgccgagagggcaagtccccggcggttccttccggcaatcggcgaagtgaggccaagcagaaggcccccgctgaggacatcgatgacggcgatgatgacctaggtttccaagagcctggggccaccattgccactgtcgatgggggagcgtgtgctcacgtttctcgccggagcctcaaggccatgaagcgagagcttctggccgcggccccgactcatgaggcgacgcgccgggcgcggtggtcggaggttgccctcaccttcgaccagaccgaccacccaccgtgcgttgcccggggaggacagatcgcaatggtggtttcccccactgtttgcaacgtgaagctggggcgtgtcctcattgatggaggagcagccctcaacatcctttcccccgcagcctttgacgccatcaaggccccggggatgatgctccggccgtcccagccgatcattggagtgacgccggggcacacttggccgctaggtcatatcgacctcccggtcaccttcggtggacccgccaatttccgcacggagcgggtgaacttcgatgtggcggacctcagtctgccctacaacgcggtcctggagaggcccgcgttggtgaagttcatggcggcggtccactacgcctacctccagatgaagatgccgggccccgatggccccatctctgtccatggcgacctcaaagtcgcgctcgcttgtatggagcagcgcgcggaccgcctcgccgtcgtgtccaagcccgagggtggcgacgagaggcttggcacatccgcccccgccgccccgaggcagcggatagtcacgtgcgatgaggtcccggtcaaggaggttgccctgggcgacggcccgtccaagaccacacggattggtggtcttctggacggcaaataggaaggcgcgctcgtctctttcctgcgggcaaacgctgacgtcttcacatggagaccggcggatatgcccggggtccccagggaggtgattgagcaccgtctcgccgtacggccgggcgcaaggccggtccggcagaaagtgcggcgccaggccccggaacgtcaagccttcatccgcgaggaggtggcgcgacttctggaggccggattcatccgcgaggtcatccatccggagtggctggcgaacccggtggtcgttcccaaggcgaacggcaagcttcggatgtgcatcgactacaccgaccttaacaaggcatgtcctaaggatccttaccccctgcctcgcatagatcagattgtcgactccacagcggggtgcgaccttttgtgttttctagatgcatactctggttaccatcagattcgcatggctagggaggatgaggaaaaaactgcgttcattacccccataggaacttattgttatacgacgatgcccttcgggttaaagaattcaggtcctacttttcaacgtactactcgaatttctttgggtagccaattaggacgtaatgttgaggcttatgtcgatgacttggttgtaaagacgcgcaaccaggaaacgttactttcagatctagcggaaacttttgagagcctccgctccgcccgcataaaactgaacccagataagtgcgtgttcggtgtacctgcgggcaagcttctcgggttcttggtctctgcccgaggcatcgaggccaaccccgagaagatacgagctatagagcggatgcgcccccccagcaagcttagggatgtgcaatgcgtcaccggttgtatggccgccctaagtcggttcatatcgaggctgggagagaaggcgctacccttatttaagctcctcaaacgctccgggccgtttacttggacggaggaagctgaacgtgccctcactcagttgaaggcgtatctcagctctccccccagttctggtcgccccggagccaaatgaacccttgctactctacttagcggcgaccccgcaagtggttagtgcggcgttggtcgtggagcgcgatgaggacaatcctcattccgcgcacccccaccttgtgcagacttggcccgggagagagcagggagaagaggcccccgagccggacggtggcctaaggcccccgacgaccggagcaggccctctccccgcttgtcagacggtgtcaggtgcccccgactcccaggacagccccgaggccactgcgggaaggccgcacctatcgccctctgaccccgaggctaaccctgtgccgattcgacccaggagagagcagggagaagaggcccccgagccgaacggaatgccgctgagaagcgtaataccctactcctgtgttttgggagatctgtgtatgaaagagctacaaagtatcagccagcctctcccttgttctgggttcctaatctggaaaggtccagtccaagaaaaagctctccccctctctcagtgggcaaggtcctccttttatatcttaaggggataccacatgcaccatccccccttctcactggggacttaccctaccttttcataaatggacggagatttgcatggttgccgtccgagtcaccttctgatgggacggcccacaactacctccactttcgccaggagcagacgcgtcgtggaattgtggccgcctgctgacgacatgaccggagtcagaccagtcacgtcggtcattctgggcgccggtgcaggggtcacgttgacctctccgagtggagacgtcctcagatacttggttcgcctcgactttcgagcgaccaataatatggcagagtacgagggactccttgccggactcagagtggcagctggactggggatccgccgcctcctggtgttaggcgactcccagctggtcgttaaccaagtcggtaaggagtaccggtgctctgacccgcaaatggacgcctacgtgcgccaagtacggcgtatggagcgccattttgacgggattgagcttcggcacgtgcccagacgggataacgtcatggccgacgaactctcacggctcgcatcctcgcgagcccagaccccaccgggcgcctttgaagaaaggcttacccagccgtcggcgcgacccgaccccttaggggagacggatgcgcctgaccggcccccgaggcccgtcggagtccaggcctcgggacccgaggggagtgctcccagctcccttagattgattgcttggatcgccgagatccaagcatacctcagaaataagactctacccgaggaccgcgaggggagtgaacgcgtccatcgcatctccaaacgctacgtgctggtagaagggaccctctatcggcgcgcggctaatggaatcctcctgaagtgcattcctcgggaacaaggcgttgtgcttcttgccgatatccatgaaggcgaatgcggggcccactccgcctcgcgcaccttggttggtaaagcttttcgccaaggtttctattggccgacagctctcaatgatgcggtcgacctggtccgccgatgtagagcgtgtcaattccacgccaagcaaatccatcagccggcccaggccctgcagaccataccactttcgtggccatttgctgtctggggactcgatatcctgggaccgtttaggcgggccccgggcgggtttgagtatctgtatgtcgcgatcgataagttcactaagtggcccgaggcttatccggtcgtcaagatcgataagcactccgcacttaaattcattaagggcatcacggcccggtttggagtgcctaaccgtattattacggataatggcacccaattcactagtgaactcttcggcgactactgcgaagacatgggcatcaagctctgcttcgcctcacctgcccaccccagaagcaatggccaagtggagcgcgccaatgcggaaatcctcaaaggtcttaaaaccaagacctttaacatactcaagaagcacggcgattcatggatcgaggagttgccagcggtgctctgggcaaaccgaactacaccaagccgagcaaccggggaaacacctttcttcctcgtctacggcgcggaagtggttctcccatctgagctcaccctgaagtctcctcgggccaccatgtactgcgaggctgatcaagatcagcttcgcagagatgacctcgactacttggaagagcgaaggcggcgcgcggccctccgagccgcgcgctaccagcagagcctgcggcgctaccatcagtgtcacgtccgggcccgatcactctgcgtcgacgacctcgtcctacgccgcgtccaaacgcgtgctggattgagcaagctctcaccaatgtgggagggtccgtatcgagtggtcggcgtcccccggccgggctccatacggctggccacgggcgacggcactgagctgcctaacccgtggaacatcgaacaccttcgtcgcttctacccctgagggggggtcgggtgtcaggtttcgggctcgggccaaccccgcaccccctcgggcgagcagggttggccgggggctgccacacatgcactttcttatttctcttatttcagaatttcaataaaagcagtttcaatttcctaaaggttgtatctgtgctgttttttccttttgaagaatcttgacttgaaataggtcactcgcgctcaatcctgccctcgggggctcgggtcggctaaaatcgccaaacggggcccagaaccgagccgtgccccggggcgtggtgaactccgggggggaatcggcaaaaacccacaatcgggtcacccataaccctcggtcaccacgttcccggcctggccagtctcgacatgtggatctccccaggcactagccccgacccgcgccttttgaggaccagaacctgggcacgagcccttattcaagctaagacacaaaaggaccacggcacagatcatcctcatctcatacttacagcaagatgaaattaacacaaaaatttcttcatttttgattacagattaagttgatctatacaaagcccgaaggccttagaagaaagaaaagaagaaaaaacagaaggatggcgggggtctgggggctcaatccgatgcgcccggatagccggcctcgacgtcattgtcgtctgcacctccggcattgccctcctcgtcggagttgggggcaaacgcaagccgaggggccgagccctcgaagctgtcgacgatatagtcggcggcatcccggacttgcgcgcgcgcgcggtcctcggtcccaggagggaactcatccagcgccatccatggagagaaattggggtccctggcctggtaactcgccaggacgagctccaccgctccttgggcgaggtccctcgaggatgacttaattgtcttctcgagctcctcggggagccgttggagagccccggccatcttcgagaggtgctgggcgaggcctccctggttgtcggcgtactttacggtccgccctctccagaggcccacttgccgaccggcgcgatctaggcgggagacggcgtcccaaagcatgccgggcccgacctcgcctgccaagcggagggcttcgacctccccggcggacgagtccagcgcgccctgcagatcggcgatggtgtgttcggcatctgcgaggcgggcggctaagtcgctttcgcccgcggccgccccgccgctgcgcgccctcgcgtccagctccttcgcccgcgcctcgagctcagcggcccgttggttcagtgcggccctctcggcgcgggcaccttccagattgcggcgcgcctgctcctcctgcgctgcctcgcggagggacaggctgtccgccagctgttgcgccgcggcctcggccccctcgagagctcgctcccgctcggtgagcgcgtcctcgcggaggcggagcgcgatctcttcttcggcgcaggcagcctcgtgcgccgccagcgttgcttcccggatggtgacagcggcctcgcggtccgccagatccctctccacgacgcaggcgtgctcttccagcgccatggcgcgcgcctcaagggcctcttcgcgccgccatgacgccgcttcggtctctgccgcccgctgttctcgggcagcggcagcgtcaagcaccccctgggcggcgtcgagcttcttccctagctccacttcccagctcccgtattgaaggcggagggtgtcctgcgcctcgttcatcacggtggtggcaatgagggcagccccccgctcctcctccacttccttggcgatctccgccagcaccttcttacgggtttcaagctccgagacatgccggcggtgagccttacggcccacctccaccatggcctccaccgagcgtcgcccctcttcgacacgcgcccacgcggcgtcgagctccgcccgctctgcctgcagggcctccacctaggcacttaacccatccaacatcgtggtgtttgcggcggtcaaagcctgcagaaggggctctgtgttcagtggggcgatagaaggcgtggggaagagccgccttggaaaggatgccacgcggctcgggccgccgatggaagtgccggactcggggatgtctcccggacccgtttggtcctgagcgtcgcccgagggagtgggcccaagcgacgcgcccgcagcctcgtcgccagctgccccggaagttgtcgcctgagcgtcgcccgagggagtgggcccaagcgacacgcccgcagcctcgtcgccagctgccccggaagttgtcgcctgagcgtcgcccgagggagtgggcccgagcgacgcgcccgcggcctcgtcgcgagctgcctcggaagtcgccatcgcctcgtcctggcgaaatccggcttcctcccgagcggcttccttggccttgtgggctcggacagcctcctcccgagcggcttcctcggcctggtgggctcgggcggcctcctcccgagcagcttcctcggcctggcgggcccgggcggctccctcccaagcagtttcctcggcctggcgagcccgggcggcctcctgggcggcctcctcggcttcccgtaggcgatctgcggcctctcgccggtcagattcccgcctccgggcctctgcggccgccggatcctcggcctcagactggccggacttggaatggcgggagggacgcgacgggatctcgctaaaacaaaagaaaagaccagaagacgaacaagatgggtgagtaaaaactcgcgttgagagaatgaatacagccacgatgggtgagagacgaacctgcgagggggtcggttaaacgaccactttggaggggaaatgaggtttccccgagatggttccgtctcccccatcttgcggggccgcttcttcatgcgctccccctcgggctgcgatgttggcgcggccccctccgggcgcctgctgctggcacgcgccgccccgccccctcggggaggagatgggggaggtgttcctccctgcttcctcttcccccgggtgttggcagggcggctgctccccggacccctgtcgcgggacccagaagcacgaccccctctcggggtagattgttccccccggcggctcccgcctgcgccgtcgtggccctttggagctcgctcctctgaggccccgaccgccatcataatggtcaggatggaggcgcggtctggatcgctgcagagggggaggattccttggggaatgagggccgcctccacggagttgagattcagcacccgttggaccaatatcttgaagtcctcaggagcccagtcccatcacactccctggtgggtcctcatgaagtcttcggacccggtgtactcccaggcgccccgagcgcgccgctggagcggcgcaatccgacgacggaggtagtcgccatacaccatggcccctgtgagcccctgggatcgcaggcccgccaggcggtcgaggacggcgtcatagccatcccccagatctaccggcgcccgccagctggaggcctgcaccgggggctggctcggaagtaggaggcgcgcttcgtcggcgaggggagtgtagaaccagtcgctcttccagtcgtcccacttcttgcggagggcgcaggggatgtagcggttcagcaccggcccccgtggctggaagtagcagccaccaactaccgatggcggcgacaccgactgcacagtgaagaaccaccggaacagccgaagagatgggcgcaccccaataaacatctcgcacagatgcgcgaagatggccaatgtcatcaccgcgttgggggtgaggtgcgccatctggagatcgtagaactccagaacatccatgaagaaagaagaaaatggcggaactagccctgccattgcaaaggggagaaagaagacggaccgccccgggtagtctggcgccgggcgtccctcgcccagcgtaactatctcccggccggtggcagattccggcatgaagcggcgcggcagcccagcctgcctctcgctcacgatgcgggaaggcggcagcacgctaccatcgagcagagcggagccccgtgccatgacgccggaggaagagaagattaagagcgagcgcgtgtggcgagggtagggcgcaggaaagaaggagttagggcgcaagcggcgaagacaaggggaataatggcgaaaggaaggaaacaaatcccttcctcagtgcctttatacccttgccaacgctgtgcccggctcctcgcttctcgcgcccactatttcgccccctcgtttctcgcgcccacgcttccactaatcccattcgcccgcttgcggcgcatgaggtggatatgcggttgtggcagtcgaggtagatcatatcgtgcgcgcgttaattacgctcgccaaccgaagcgacgttaccatatctccagatgaaacgaatcgccatgtccagattcgtgtgctactcgagtaatgtggcagtcttgaagagaccgctcattattgacagccgagttaccattgccgatgtgcgtgatttttgaccgttgggtttctgcccaattgtggagaccggtcccacctgtcaccgggccttaggagtggcgtcacgcccgaccgcttcccttaaggagggcgaacgccctggcataacgccgagggctactgtcggtgacatgggatcgggagtatcatgactagaggtttgaggcagacataatcgccaacgtggcctggcaccctcgggggacgttgggcccgagggtgatgtgttcgccctcctcttagtccccccgagggggtcgggctgcacccccctcggccccgagggccgaggcgccccgacccctcgtgggttttcgctccgcgtgtatggggtaggtgagcacagtggggctcacctaaccacatttattgcggtttggctgagcgtgtcacgacgcatgtaacgtagtgcattgcactcatttatccggtctgtgaccagtcacagaccggtcagatcgcgggttaggtggcgacaggcggtctgacgcacgcctcgccccatcccgtcaggacgagggcttctaggcgctcgtccccagctggagctagcgtgttacctcccagagatggcacgttagtcctgaccagatatatgccaggcttcatcctaaccattacaagcaaaatgttgtctgaagaagggcgaacattttgattgctaagctgacacgtggtggacaagaatgaccgacgtgactggtctgactccggtcatgtcgtcagcaggcggccacaattccacgacgcgtctgctcccggcgaaagtggaggtagttgtgggccgtcccatcagaaggtgactcggacggcaaccatgcaaatctccgtccatttatgaaaaggtagggtaagtccccagtgagaaggggggatggtgcatgtggtatccccttaagatataaaaggaggaccttgcccactgagagaggaagagagctttttcttggactggacctttccagattaggaacccagaacaagggagaggctggctgatactttgtagctctttcatacacagatctcccaaaacacaggagtagggtattacgcttctcagcggcccgaacctgtatacatcgccggtgtcttctgtgcttcctgtctcgcgaaccttccacatacagattgagagcttagaatctcacccagggtccccggccgaaccggcaaaggggggccagcgcggtctcccggtaaggagccccacgctccgtcagacactaaacacaatttcctaaagataaaaggaaactaacaaactattcctaattaatagataacttgtcatgccgcattctctttaaactcggtctcttctggataagttttatttagtagatcaatttccttaaccgaatatagcaagaatccgacaactgatgacttgacaactctcatcggctaatctcaggacttcgaagccgatgctgactctaaaccgatgactactccggacttaccaaatttcactgttaacaaggccatagtgataaaccaataaatctttcaaccaacaccttttgtcagcatccttcagtgtcttgatcttggccttgagttcttcaggtaaattaagcaggtaaaatatctatctcctcccactagcacctctgcatgaatctagggatataaaaggcttaagttagcggcaagttccattttgcacacgccagctttggtttagaataaaacattaagctgagaggcctcagattttataaatgcgatatcatcttctaaaaatttgcattgagggcattggcatcacagattacaataataagacaagatgactacttcctccgttttacaatgtaagtcattctagtatttcccatattcatatatatatatatatatatatatatatatatatatatattcattaacatcaatataaatatgggaaatgctagaatgacttacatataaatatgggaaatgctagaatgacttacattgtgaaacggaggtagtaactccgaaaaaatgcagtacaattgtactgcaggtgaagtaggcatgacatttattgtgtacatattcgagtagagtagtttatgaaactctgatccatttaattagcaatcaattggttctcaaatttaaacgatggtgctaaacagggataaaattcagtgttaggccttcaattgaatggcatgggctggaatagtagcagacccgagaaattttagagttggtcaggcctaactacggtgagtttgtttttttatgtgaaaacttcatcctcaacacctatggaagcgtttctttaaaaaaaaaaaacaaacacctatagaagcacaaaattccattgtcgacgattgctcaacatccatcaattggctggaagaccatcaaaagttcaacaccactatgattagtttagaagcccataacttgcttacttatgctccaaaagaggtggcatgtacgtttgtggattgttcatcacatcatcaccgaaaataatttgagacttatgctccaaacaacaagaaatgcggaagacagcaagcagttagtctgcatcaagccaggctgcaacacagttcctcccaactacctaacattggaagccaccgcggcctagttgagccggacgagcggcaaaggggagggagtgagaaggtcaaagtggacgaggaatcgacgacgtaccatggtaatggacgaggcccgtgacggcgctggacatgcctaaagtcgtcgccggaggccgagcgtccgggtagatcgaagacggcaaggcggtggatcctgccgacgctgctgcagccgcgatgagcggtctcaaagccaagcggagatggggcgagggttttgggagtccggctccggcagcagtagcatcggaggagaaccgggtcgtctccgtagccgacggtggtgagttgggccggataggtacaaaggacgtttgcaacgaattgggctggaatgaaatccccacgtattatgtactccacactctttgaataagtctatttgatctccctcgtcctcttgatcctgaatgaatatctcccttggctacagaacgggatatagcacgtctcctccatctttaaaaactgatacaaataaactacttcggtgtttttgaaaatgatttttttgttgacgtggccagttaaccatggttgtctcgttaacaaatgagaaccacgtgtcagcgacttccttcttatgtacgcgtaagtgcataacttaaccgagtagcgtgaatacaagcaccggtacaacacaaaaactaactggcggagacacgccaactcgcttgctggcgcacacacctgtgtgacccgtgggtctgcgccctcgtgggactttttctttcaccttttttttaaaaaaagaaatgaatctttcatctttaatttcggttgaaagttttaaatttgagttaaatgttttgaattttgagatgaaagtttgtaaacctgagttgactgttttcaaattttcacttggattttttttcaaatctgagttgaaagcttttaaatcttagttaaaaattttaagtctttgagttaaatattaatgatttcacttgaaagtttttaaatatgagttgaaagttttaaattttttaacttaaaaattttcaaatcttaacttaaaaatttgtaaatctgagttaaaagttaaaaaaaaaagaaaagagaatgaatataagcccccgtcggttcagccggtattgggggtgaagttgggattagagcaggtacaatagcagactattagctagctataaacatattttaatgatataaaagatgaaagagaaaagcagcgggctacaaatctgtaggtagctgcagcatagactccaagagacggtgtgtgtatgacagatgggaccatatattaatagtatagtaagcaactattatatgaattggctattaaattgactatagataaattggagcttgtagtgggctatactgttaaacttgctcttagagttgctcccgatcggctggcgctcgcccaccgggtgacgcaagcaggcagcagccgacacgagccgtcaaaaaggttggcgttgccaagctcacctcctcccttggagtctcaaacatggggcttcccgtaaacagataccaggtgggttctgttaactccgaccgtgccgtgccgttcggtttcaaaagccgcgagtcgtgcagccaacacgcgccggatcttagtttcaacggccgactgaattcttcggttggtttagtccacttaagtactccagttttgatacttgagcacggcggattcagcttaagggcctgtttgtcacagctccaactctggagtggagttgtggagctgcctaaacccagctccacaactctattacattttgtgagagagctccacccaactccactcctagttttggtggagctaaaactgtttggctgagctccagctccaggaggggtggagttggagctggagctgtgccaaacaggccctaagtgttctaagtaaacaaagcatcttaatataaatatgtttgttttacggtcttatatgctattttcacgttccattaattatgtcataaactgttgttgatttgtgccagttttctcctatttcagttagtagtatcgtattttgcactacgtcggtattttacttacctttggaaattgtaatcgcggaacttgtaaccacaatataccgaatttgccattgttcattggttttctctcgtatctctaagacaatcataattagcatgtgtagctcacgctaaaattaaaagtttagttaaaattgaaacgatgtgatggaaaagttgaaagtttgtgtgtaggtaagttttgatgtgatgaaaaagttgaaagtttaaagaaaaaaattaggaactaaataagacttagcgtaaaaaatcgtcaaattcactcgaacgtactactatagtactatttccgtcaaggtttcaaaaagacattagtcgatcgtaccagtctgactcgaatcgtcggtcgttccagcagcagatgcaattgtttagtacaagttgcatcctagtacagtagaagattcgccaggttcagcgaaaacctcgcacggtttacgtgccagagttggcttcgtgatcctctcgtccagaaaggcaatggaatatactctactgctcgtacgcgcccgtgagatgagcccacgcgcacgcccaacccatcggcaattcggccttgtgctgcccagtttttgcgcgcgcgccgctgaatcctcaaaaatggacgacaaggcgacggcattccgtttcgcgtggtcgcagttgcgcctcccccacccctcacccgatgaccaccctacgctagcaatcttcctcttgtcgtcgtcctcctcgtgctccgtggcatggcggcgcaggtgctcgcagctcgcgtataaatagcggccatgtccatacacggcagactcacacaaccaacattcagagttcgagtgaaagttctctcacaagttcagagtagcatttggctagtgacagtaactggtcagtgtctctcaccatgtcgtccaattttgaggccaacaacaacaatggcgagaagcagctggtctgtgtgaccggagcaggtggcttcattgggtcgtgggtggtgaaggagctcctcatccgtggctaccacgtcaggggaacagccagagatcctggtaagttactaactagtagttcacggtgttaccattaatttgctgcattttgtgcttgatttattgatcggttcttgcacgcgcgtatctgtagctgacagcaagaatgctcacctgcttgagctggagggagccgaccagaggctctccctctgccgtgccgacgtcctcgacgccgccagcctccgcgccgccttcagcgggtgccacggcgtcttccatgtcgcctccccggtgtccaacgaccctgtaagttcactagcctggttcttgagcccaaaagagacgacaatggcgcctttaacctcctccaacttttactaacgctgctccgtgctgcaggacctggttccggttgcagtggaggggacgaggaacgtgatcaacgcggcggcggacatgggcgtgcggcgcgtggtgttcacgtcgtcctacggcgccgtgcacatgaaccccagcaggagccccgacgccgtcctcgacgagacctgctggagcgactacgaattctgccgccaaaccgacgtaagcacattactctgctgcgtttctaccaactccaaccgcgttgcttgcatgaacagtaaattgatcatctcggcaaaattttctcgtcgtacgtgcagaacctgtactgctgcgccaagatgatggcagagatgacggcgacggaggaggcggcgaagagggggctggagctggcggtggtggtgccgtcgatgacgatgggtcccatgctgcagcagacgctcaacttcagcagcaaccacgtcgcccgctacctcatgggcaccaagaagtcgtaccccaacgccgtcgccgcctacgtcgacgtccgcgacgtcgcccgcgcgcacgtcctcgtctacgagcgccccgacgcacgcggccgctacctctgcatcggcaccgtgctccaccgcgccgagctcctccggatgctcagggacctcttcccccagtaccctgccactgcaaagtacgcaactattagacattgatttgcttgtgtgcgttgctgaaatagtcttctgagatgtaatcgatcgatctcaaatttttcatgcgtgtgtttcttggatttttcaggtgtgaagatgacgggaagccgatggcgaagccgtacaagttctcgaaccagaggctcaaggatttggggttggaattcactccactgaggaagagtttgcatgaggcggtcttatgcatgcagcagaagagtcacctgcctctgatttatcccgttccaaaacgtgcttacctataatcgagatacaaatactcggatttgtctgttgtgatgggaaacagagagcaacagggagaaaaaaaaaacaagaaaatacaagggctctgagaattcagtatgaaattgtttatttgagtaagtgtagtaggcatttgtattttgttgttacacatgtaaaacccttctgtaatgaacaataaggtcccatggagggaattgtaaatgcaaatatggattccatttatattctgggtttcaggatgtaaatttgaatggcactgtatttattcctattttgcgaggcaatttcctagtatacagtgcagtaccgaacctaaatgtctctccctgcagatcgcatggagttgaagtgttaaatgtgtgtgcagatcacgtcgagtttacagtgtttcggcagaaattggagagttatctgaactccagagcactaaagtctgacgacacttttcatagtttggacaggtatctgaactctgacgatgtcatcgatggtatctgaaccgtagagcgagcgctgacattctgatcaatcatgagagttggatagtatccgaattctgacactcttgcagagtttttgttcacagatcaacaggtccgtgaccaatttcataatagcgaatttacgacgagagctatccgaactcttgcagagtttgtgttcatggaccaccaatttcatagcaaattagcgacaccgaacattcatggatcaccaatttcatactccctccgtcccaaaattagtgcagttttgcactattcatgttcaacatttgaccgttcgtcttatttgaaaattttttatgattagtatttttattactattagatgataaaacataaataatgctttatgtgtgattatatatttttaatttttttcataaatttttcaaataagacgaacggtcaaacgttgagtacggatatccacggctgcacttattttgagacggaggtagtagcaaattagcgacaccgaacatcagtgacaactcttcctgcaggaagatgtgaatgtaaaaggcgcagaggatcataattcagagcctagccaagaagaaatcaaactttaaacacatcaacatcaaattggatatcatctatatacaagaacactaagggtgagtttgagatatagaggattgagaagatatgtaaaacgagatgagccattagcgcatgattaattgagtataaactattttaaattttaaaaatggattaatatgattttttaaagcaactttcctatagaaaatttttaaaaaaacgcatagtagtttggaaaacgtgcgcgcggaaaacgaggtattttctcaccctatctcacacaaacgaacacatcaggcatcgatactccgtctagctatcagcgcaactgcatacttaaaaattaatcgttggtttggttggggtgcgccaggcccgggcagcagtgcaacacctgggcgacgcgtgagggccccagcggcaagccactgtagtggaccctcccccacaaaaaataaatttaatatcgaagtgggcacatagcccatatatcagatattaaactgataagaacagatactacacttgatcttagccaaaaggccgagaaaggtatgagttgctccgtgcaaccctgcctgcttatatacagagcgccttgcgcgcctcagctctgcgtctccgaggtggtactaaaagctcaaactcaaatatgggcctcagctctcttcttgagacgaacactgggccctgggtactaaaaaggcccatcactgggtcgctctgatccgtcacacccacgatcggtgcaagcccagatatgggcctgatttgcttctctgttgttagtgaaaaaggcccaatattagtcccaaaaggttgtgcttccaaactgagctcaattgaacggtgaatctatggaagtatatatagacgttcatttccatggactttgttgtcagaaagttactagtaaatatatctgtggagattatgggtaccccatacccacacggcatggttatccgactagtaataggggataacatatatctatggaatatgtaaccgatcatgacttgggtattacgtttccttttatattatggagcggcctaaagtcctgattcgataatattgtaaaatagatttaggaaaccgataccgtattggttaaggtttctatcttgtaatcctgccccccatcctatataaggtgggcaggaggccctctagggggcatgagacaacctgatcgtcagatcaatacacactcggcggattcaaatccccaaacaggagtagggtattacctctcattgagagggcctgaacctgtctaaatcctttgtctctgcatccatccactttaggtctcgtccgctacccccttttattattgccgaattcatgtttcgacagttggcgcgccaggtaggggatgcgtcgaattacccgtcgaaaagtgagatggaatccacttcagaagaaacggcgagatcaatctcaccgaattcgatggctcgaactttggaccgggtttgtcgttccaatctattttttattagattaattttttttctatcatagatcaatcttctggtatattttcctgtgtcgatcttgtgtcggtcggcggagatcaagccgaagctgtcgacgacgccctcacgcatcgagactttcttcgtgctttgccggcggacatgtggtggccatcgctgggcacagtttaccaggagaaaacactgcatgagttgattcaactgatcaacatacatgcacgatccaaccaacatgcacattacatctacagagttaatctgtttactagttgattctaaccagcaattattttgttgctatctgtcttgcatgtacaccgccggccgtatctactgccggctatatccgtcagcgccgaccggctccaccgtctccgtagtcggtcgcctccgagctgttatcattaggctttacagctgccccggtcggtcatctacatgctgccgactctccgaggtcgcagggccgttgatggcttccgccggctactgctgatcgaggcattgcgacccaagctgatcgacgcgcacgacgtatccaagccacgccgtacaacttgggttggctgttccaatttaatttttattagattgattattaattaatccctaatcgccggccgttttgatttcctggcaatttttgttgtttttcacatgctggttgagatcacgacacggccgccatcgtcgcctactcggccactcgggtgcctcttgccgtgtccgagtgctcctctcttcccttccatgcagatggacgtgctgctagattggcacaggacacaggaatatactcggccaccaggagcaagcacgtgtatacgtcgatttaatctacatgtatgctggagcgatggttgttcgcatgcattggatggcagtcgagatcaaacaatcattcactgcttgcggcctcgctgccacggttggtgtgtgccgccgccgttgccgatagcgacatcgtcttcaccactggcttgcctccgtcgccgccgattggtgcctccgcctacacggctggtctattatgccgccgctgttgggcgtctacgacttcaccgccggcctgcctccgtcgccgccgagtggtgcctccgcctacacggctggcctattatgccgccgctgttgggcgtctacgacttcacgccgccggcctgcctccgtcgccgccgattggtgcctccgcctacacggctggcctgttatgccgccgctgttgggcgtctacgacttcaccgccggcctgcctccgtcgccgccgattggtgcctccgcctacacggctggcctattatgccgccgctgttgggcgtctacgacttcaccgccggcctgcctccgtcgccgccgactggtgtctttgcctatatggttggttggtcacaccaccgttgttgggcgtctacgacttcaccgccggcctgcctccgtcgccgccgactggtgtcttcgcctatatggttggttggtcacaccaccgttgttgggcgtctacatcttcaccgaccggccgtctcgtccgccgccgactggtgtttccgcctgcacggctggcctattatgccgccgctgttgggcgtctacgacttcaccgccggcctgcctccgtcgccgccgagtggtgcctccgcctacacggctggcctattatgccgccgctgttgggcgtctacgacttcaccgccggcctgcctccgtcgccgccgattggtgcctccgcctacacggctggcctgttatgccgccgctgttgggcgtctacgacttcaccgccggcctgccttcgtcgccgccgattggtgcctccgcctacacggctggcctattatgccgccgctgttgggcgtctacgacttcaccgccggcctgcctccgtcgccgccgagtggtgtcttcgcctatatggttggttggtcacaccaccgttgttgggcgtctacatcttcaccgaccggccgtctcgtccgccgccgactggtgtttccgcctgcacggctggcctattatgccgccgctgttgggcgtctacgacttcaccgccggcctgcctccgtcgccgccgactggtgtcttcgcctatatggttggttggtcacaccaccgttgttgggcgtctacgtcttcaccgaccggccgtctcgtccgccgccgactggtgtttacgcctgcacggctggcctattatgccgccgctgttgggcgtctacgacttcaccgccggcctgcctccgtcgccgccgagtggtgcctccgcctacacggctggcctattatgccgccgctgttgggcgtctacgacttcaccgccggcctgcctccgtcgccgccgattggtgcctccgcctacacggctggcctgttatgccgccgctgttgggcgtctacgacttcaccgccggcctgcctccgtcgccgccgattggtgcctccgcctacacggctggcctattatgccgccgctgttgggcgtctacgacttcaccgccggcctgcctccgtcgccgccgagtggtgtcttcgcctatatggttggttggtcacaccaccgttgttgggcgtctacatcttcaccgaccggccgtctcgtccgccgccgactggtgtttccgcctgcacggctggcctattatgccgccgctgttgggcgtctacgacttcaccgccggcctgcctccgtcgccgccgactggtgtcttcgcctatatggttggttggtcacaccaccgttgttgggcgtctacgtcttcaccgaccggccgtctcgtccgccgccgactggtgtttacgcctgcacggctggcctattatgccgccgctgttgggcgtctacgacttcaccgccggcctgcctccgtcgccgccgattggtgcctccgcctacacggctggcctattatgccgccgctgttgggcgtctacgacttcaccgccggcttgcctccgtcgccgccgagtggtgcctccgcctacacggctggcctattatgccgccgctgttgggcgtctacgacttcaccgccggcttgcctccgtcgccgccgagtggtgcctccgcctacacggctggcctattatgccgccgctgttgggcgtctacgacttcaccgccggcctgcctccgtcgccgccgagtggtgcctccgcctacacggctggcctattatgccgccgctgttgggcgtctacgacttcaccgccggcctgcctccgtcgccgccgactggtgtcttcattgttattgatggacgactttgttcccacattggtcacttctgccatcaccaaggggaatattacaaagctaagtcatcatttattttattttttatatgatatttttccttttcctctgcctcactacaccaattggtcttccattgagtagtgagtcgagggctatagatgttatatcatattttttataatatttatcttgattgcttgcgacataatctgagtacaaaagtacctatcgagttatggagttctatcttcctatgctttccgtttggtttgccattggatggttgcctttgggccgattcctagcacccgggggctcgttcgatggaccgagtaacgcaaggtgctaagtattattcggaataaatcaaaagcatagagacgagataaatttattttctgctcttaataattgcaaaagtacccgagtagtaaattctgatccgtgaaactttgttccattaatgacgaactcatatcactcatatgcatgtttgggaaatgcctaggccgactcccgatgcttgtgggctatgactagtcggacagagtgtttaaatgtacagagtcatctgctcggggaaatcacaattgataagaggagaaatacatatttataaatattttaaaatacttgattttttctcgagtattatatttatatcagatactactcatccgatatgtttgttctgcaggatccagatccagatatgcataaaagggattcatggctttaagcttatctcttacgctccaggaatggatcagtcagaacatcaccaccggctcgcctcgaccgccgccgactggtgtttccgcctgcacggctggcctattatgccgccgttgttgggcgtctacgtcttcaccgaccggcttgccttcgccgccgccgactggtgtttccgcctgcacggctggcctttatgccgccgttgttgggcgtctacgtcttcaccgaccggcttgccttcgccgccgccgactggtgtttccgcctgcacggctggcctttatgccgccgttgttgggcgtctacgtcttcgccgaccggccgcctcgtccgccgccgactggtgcttccgcctgcacggctgacttattatgccgccgttgttgggcgtctacgtcttcaccgaccggctgcttcgaccgccgccgactggtgtttccgcctgcacggctggcctattatgctgccgttgttgggcgtctacgtcttcaccgaccggccgcttcgaccgccgccgactggtgtttccgcctgcacggctggcctattatgctgccgttgttgggcgtctacgtcttcaccgaccggccgccgcatccgccgctgactggtgtcaccgcctgcacggctggcctgttataacgccaactgatgctatcttcttcacggctggctacatcgctgtcactactaataggcatcagtatcttcaacacaagctgcctacgtttgccatggctgccgactggtttcttcacttccatggctgcatgattctgccagtgttgattggccttaccatcttcatcgccggtcgtctcgtctgctgctgactagtgccctcgcctctacatctggtttatacagctaccactactgatggacatcatcatcttccgtcgccgactgattatgccgccgccgactggtgcttttatcttcacaactgcgcgtcttcactaccggatttctacttggacatcttcaacacatatcttcaatcaagcaatgattactcgacgacaagaagctataattctcgactctatgttcagttgtttcccaactaaccaaagagtcgggggctacacaaatacaagactctcaaaattcgacaagatgaagcaatcaattaatcagccaacgagtcaattccaggagtcattatcttcgtctttgctttagagcagagttatcaaccaatcagctcagtttcgacgagttggacaacatcatctactttcctccaagtgaagcatctgcaacagctataacaccaatttgatggattattgtcactgacatcatcaccagcacctctgcttcatcgaccctgacatctctgctgttgctaatggatgattatgttttcgccgacttattatttcaccttgacggttgacctactatgcaaatgctgatgagcgtctttgtcattatcattggttgctacactgctattggctggatcaccgacatcgtcatcttcatcatgtcggttgcgtttgtcgtcgtcaactattttcttcatcttcatgattggtggatttcgccatcactgttgatgcgcgtctacgtcttcatcgtcggtttgcttttgtcatcaccgactgtttcttcgcctccatggttatgcaacttcattacctttgattggtgtcactgttttttactaccactgacatcttccgttacttctgatgagcaatttcgtcttcatgttggtcatttcatctccatgccgactgcgtcagctattgccaatagacaattttgactatgacagaaggacaagctatatgctcaggggctcatcaactcaagcgtgaggattatatctccaattgggacttgttccggatacattccacatggattcatagtcatgagtctatcttctatgctcaaagactggaccaattattattccccgtaaaggctatcaactgaatacttgcgccagtcgggattcaattattatatttattttggagtatcccataagggatagtcattcagatcagaagctattcatatgagctacacttggtctatattacccagaagatttgttactcgggagcatgtcacatgcgtcatcctttaaagggtgtcgaaggcatattttttggcctaggcctaatatgtctgcagcccatattttcaggtgtggcctgtcacgttcttttagggacttaggcactttttgcttaggccaaagtgcgcgtgatcaagtgcccaataccttaaaatccttttataccgcagttacttaactttttaggagttggtacaatgcatcttaaaaggtgtcaaacagtaaagctttatatagctgtcccgctgacttttttatatataagtcaaggtgctgtttgggtttttaagcaattgattggatacaatatcattgctttttgccacgtaagtgtgcatttttattgaccaatattatggcttaggctgattatatattgtggtcattttctaggcggttggtaaatcctttatgagtttatttattcggattttacaccacatatgccatatatttccaggtgtggtgaaaccatgtgtcttctagggacttaagcacatctgttaaagcagtgtgcgcatggcgtatgcccaatactttggaaatttctttattcacaatatacaagcttctttatagctattttgctatatcactcatcatattttacaaagcagtcggtatatcacttggatcatattattcggggattcacaccgcatatgctatatattggtatcaagtcacttggttgactacgattatcaaaaccactcagttggtgcatctattagatacatctattcgatgcacctgactttatttttcagccctccacagtcttcatatttggtaaaagtactcgggagatcatggtgaggatgattgaagcactcggctttggagtaatctagttcgagaaaagattatctttccgactgtgaaggtctcaggggctactgtggagattatgggtaccccatacccacacggcatggttatccgactagtaataggggataacatatatctatggaatatgtaaccgatcatgacttgggtattacgtttccttttatattatggagcggcctaaagtcctgattcgataatattgtaaaatagatttaggaaaccgataccgtattggttaaggtttctatcttgtaatcctgccccccatcctatataaggtgggcaggaggccctctagggggcatgagacaacctgatcgtcagatcaatacacactcggcggattcaaatccccaaacaggagtagggtattacctctcattgagagggcctgaacctgtctaaatcctttgtctctgcatccatccactttaggtctcgtccgctacccccttttattattgccgaattcatgtttcgacaatatcgaatatactagaaagtaaccgcagcttcgcgcggaagtatacataggccaggccaataggatgcagtgtgttccctattaattatcataccttgtcatcagctaaataaggcattaatcatattctgattggcatgctcatattgcaaagccccaaaatccctcagttcccttcgagaaaaagaaaactatcggttccatgttttaccatcgtgttgttctgcagaaatgattattttctgtttgatggccattttgaatagatagaaatttaccaaaagttataaatagatagaaatgcatatattataaatataccaaaagttagtgttgtgcataatccatatagcaaaagtatgcggtctttatcagataggttatcaagcagagcgactattttgactgtgtgtttgaatcaaacgataatcagtgttttcttcactactacttctctacgataataatattataaatatttatgtattatattgaataattatatggtcgtcgtggaacatctaaagtaaaaccctagagaattaagacacttaagaatcagtgaatcaataacatcctttataatagtaaatattgacagaagcaattatataaataataagtaaatagtatcataaagcattttattagatggattagattttctccgatgtttcagaaaactaatatgtgattccaaagtatatgaattgtactgtatattaaagttcttcagcataatatatttgagctatggactcaaggacaacaaggtcccgtcaaacatttaagtttcataatagtaaaattatataaagaattatcacagcttgcttaagcttcaaatttgcttttaactacaaaatcattccaatgaacatggcaggcaaaccccaaacatcttctctagtttgttactgtcatataattatagagagcatgcaaagcacacttgtggtaaaaaaaaaacttaacatcattgattcaaagtacaaagaacttgtcgaatgaaaatttttctttagaccaacaatgcaatttttactctaggatatacttgtatactccatctcgaataaatgcaattcttactctaggcagtctatacattaccctgctcagtcatgactcaaaattagttccaagaatatgtaattaacgcagcaattaatcatgtttgaggtgactccatttgtgaagatgaactctgcattaaaaaaggaaagtattacatattatgcaatactaacagatatataggcactattcttctcatcccgaaatctgatgaacttgtagatatgattgctgcactggagacggtaataattttttcaataacatttggaaaaagaaatcaatagaacaagacaatgatgtgaacaaatattatcgagaagcaagaaagggcaaaacttaaggagtgcagtaaataattcatctacagaaatcatgaccatatccatatggtaatcgaatgatcttggatgggaacactttcactttctgcattggacactgaaagatcattatctcgtggtagtcctggatgagttatacaaatccttgtagcaaaatcagagcagcttttaaaagcttatcgatctcagtttgagcagccaacagatcaagctttctcaaggttacttctcaacctaggatcaatcagcaaagaacaattctaattataggatcagctatggacatcaaacaataattgcttacaacaatttcacatttttctagaaccatacaaaatatgcattgtgttcatgtccactcgcctgcagtccgctccccatccatctatgcactgtcaggggaaggggaaggggaagtggactcacgagctggcgaggatgacgaccgagagaggggcaagagattagaaaggtagcggcagcggctatgttgacggctacggatgggatcgaccactaggcggcggattgagcgccttaacatcgaagtccagccccggcgcccggccatcgatcccagtcgattgctgcgccaagctcgaccactggcctgccgggtcaagcacatcagcaaggaagaaagggggcgaggaggaggcggcggcgctcggctcgcgagatgagaatgcgcgggagaggtaaagtgagggaggcgctgtgggatagggtttctaggggcgacgcttgacgaatcggcgaggtccggcactgatgtggagcggcggttgcccggctcgcgacttgccgaaggagccgaggaggaagaagcgaggccgcgagaggagacgatttctctggaagggatgtcaccttttccgtttaaccccctgagaaatctaaaatttacagttagatcctttgttccttctatgccgttgttttgttatccaacggatgcagggtgagagccaattccatcaattgcgcgatgccacgtggcggggctgtccggccgagaacgtgcccggaattcggtataagagatagtaacaagtggttcttcacgttatttgatacggagtagtactactaagtctaagttcgcatgtttaaggtagcgtctaagtcaaacaatgatggccggtcaacggccataacgacacaagctagctagcttgtgcgatgcaatgtttcgaagcatcgattttttaccatgaaccacaccccctgcttaagaccaatgaccaccaacagtggctatccgagtttgacagtcaaccttaaaccttcacatgatggcggcattcttattgacaaattgtttacttctatctgccttttcagctgtgatgtttaacaatatgctatctggcacatgcacgatatcactaagataatgcttgggggtggtcaattttcatttgaaatctctggttcctgcacaagcaactttcctgcgctcaggtataggcgtatagcttgacactcaaattaagtacatgtaccacttgatttgtgtctagtgtaaatcgcattagccatcgatttcgaatattaaagaaaagatcgcagtgaaatattcctgattggaagatgcttgacggaatatatgcaataactgacgtgatcttttttaaaaaggggaattttaggtaccgctgataataatgaatgaataaagaccgtccattacttttctaacccaacggattaatataccagttaaatttagggttgaagaaattaagatgaaattcttttgttcacaatacttaaaaccgtgcacaattttcagcaaaattagatggaaaataggccataacgcatattagcgataaaaaataattcgtaagtaattttttgtgtgtgttttagcgactcaataatcaaatgctataagattctagtaagatgagaaaaaagaagcaccaaaatcaactctaaaattaaatttacaagggttaattcgcgagtaataacggtaataatctgggtatcgtatccagcacatgtctcttcacgcccggagattccaatccgggttaaccaaccttatcgccgctgaatgagactgacgacccaacgatctgcagcaagttaattaattttatgtgcgtcgatgccgcactataaattagtcatgcacagttgcatccatggctgccaagctcgaacaagcaattctcagggataatcacacgatagtagagcttaattagtatcatcaaccgtgccacggtgccgatcgatcagcgacacaacaattaagctcttcaacatgtcgtgcaattctgccgaggtcgcggccaacgacggcagcagcaatggcggtgagaagcagcagcagcaggaggaggaggtggtgtgcgtgacgggagcgggaggcttcatcggatcatgggtggtgaaggagcacctcctccgtggctaccgcgtcaggggaacagccagggatcccaccaagaacgcccacctgctcgcgctcgacggagccggcgagaggctcaccctgtgccgcgccgacgtcctggactccgagagcctgcgcgccgcgttcgccggatgccatggcgtcttccacgtcgcctccccggtgtccaatgaccctgtgagttcactgttcagaaagacaaattatataattgctttgtttgatcgagtagacgagtacttacagatggctgctgctgctccgtttgctgcagaatctggtgccgatcgcggtggaggggacgaggaacgtggtgaacgcggcggcggacatgggcgtgcggcgcgtggtgttcacgtcgtcgtacggcgccgtgcacatgaaccccaaccggagccccgacaccgtcctcgacgagacctgctggagcgaccccaaattctgccgccaaaccgacgtaagttcagttccctctctgcactgtaccatgcgattctcaattcggaaatctgagacgcaccgtgacatgaacaacgacgacgcaggtatactgctacgcgaagacgatggcggagaaggcggcggaggaggaggcggcaaagcgaggcgtgcagctggcggtggtgctgccctgcgtgacggtcgggccaatcttgcacccggccatcaacaccagcatcaaccacgtcgtccgctacctcacgggcgccgcgcccacctacccgaacgccgtcgcggcctacgtcgacgtccgcgacgtcgcccgcgcgcacgcactcgtctacgagcgccacgacgcccgcggccgctacctctgcatcggcgccgtgctccaccgcgcccatctcctccagatgctcaaggaacttttcccacagtaccccgtcacttccaagtacgtagttgcatatataacgttgcatgaatcctgtgccgtcaaagccacataacttttttctttgacatataggctcaataatcattaggctcacatgtcacatgtcagtgataaggcaccgtgcatttgattatagaggatctcaattcttatgatagatgcagtgcccttctcaaattatcacgtattgatcatgttgtgattttcatttctggttattttttttaggtgcaaggacgatgggaatccgatggtggaaccgtacaagttctcgaaccagaggctcaaggatttgggcttcgaattcacaccaatgaggaagtgtctgtatgacgcagtcgtatgcatgcaacagaaggggcacctcccgctggttggtaccgccgtaccggaccaaaatgtgacctctaatacgagctcgatcgtctaaggcaactggtagattcgagtaatcttctgatgttatcacaatagcagaaatggactgtagtctaggttataacggtttatgttaacccaaggagtttccacagaaatactactcgaaaatatctgaaattactagcgaaatgtctatgctttgctacggataatataaaatgtattgtaatgaaatatgtaaatatatgttattggcaaatatgtattaggaatgaccagtgtaaaaatacaatgtataaatatccaaaattacatccaacaataattaattttcagtaaagaaaaggatgatcaagaatatttgattttaacacatgttctatagtataatcagatatcactaaaatttgaaacaaaaaaaaacttaagactcttgtcaaatatcatacaagagcaccttttataatgaatgataaggtcccatgaaggtaatggtgaatggaaatctggatttcatttgaattgagtactaaccagagctctaacgtctgatgaaggtctctattattcagaggtggagatttatttgaagtctgatgaaagtataatattgagacgttgttggaaaggtataactctagagtaactagtaagagaagtggagtcgggtatctaaactctggagcagattcaaattgtattgttttcaaattgtttaaaaccttaaaagagtattcaaactgtttttccttggttgcaaatcctgtatggttttcaaataatgtttaacaagttctaacgaaggtatgtctgaagctttagtttttaataatctgaatgatcaatttcagattagtatttttctatatcctataatcataagaccaaataaaaatttaaacaatgtattggttggggtgcgccaggcccgggcagcagtgcaacgcctgggcgacgcatgagggccccagtggcaagccactgtagtgggccctcccccacaaaaaataaatttaatatcaaagtggacacatggcccacatatcagatattaaactgataagaacagatactacacttgatcttagccaaaaggccgagaaaggtatgagttgcttagtccaaccctgcctgcttgtatacagagcgcagcgccatctactaccctccgtctccgaggtggtactaaaccgagtgccatccatccatctgcccggtgcaagcgcggatatgggctggcatttcccttttagggccgaaatatgggctggatttactgctgttgcgtgttactagtggtaaaggcccaatactagaactgggctgtctatatccgtcacggtccacggtggtaaatgggccggcccagcaagggctggctcttctagaagagaaacggactgctctctcgccctggcgtcgcagccatggctagcgcccacaattgaaggcgaggacgaagacgtcaagaagttgttgttctaaactgagtcaagtgaacggtgaatctatttggttagctcttctatttcggcggaatttgttgtcatgaggtcactattgccgcaaatataagtggttcttttacgtgtgttttggcaccattcattgtttaactgtgtgctggtagtgtccgagtcaattagttagtcaaacatgatggtcggctaaatggccattggccatgacagtatgacactagcttctgccgtgcgaggttttgaagattttcccaaaaaatctttatcccctgcttgagaccagttaccagcagttatccgaatctatctatctatctattattattatattattattaaaggaatagaaaaatgagcctccacgttcgctctcatggcctagaaattctcacattaatcgaagaaaaagaaaaagcagagtccatagaaatacaatttagaaatagctgaaaatcggaattaaaaaataaggaatattagaagaggagactagagtccatatagaaatacaatttaaaaatagctgaaattcggaattaaaaaataagaaatattagaagaggagagtagagtccatatagaaatacaatttagaaatagctgaaattcggaattaaaaaataaggaatattataaaaggagactagagtccatatagaaatacaatttagaaataactgaaattctgaattaaaaaataaggaatattagaagaggagactagagtccatatagaaatacactttagaaatagttgaaattcagaattaaaaaataaggaatattagaagaggagactagagtccatatagaaatacaataaggaaataactgaaattcggaattaaaaataaggaatattagaagtagagtatagagtccatatataaaatacaattaggtaataacagaaattcggaattaaaaataaggaatattagaagtagagtatagagtccatatagaaatacaattaagaaaaaaaatagaaatttagaattaaaaaataaggaatattataagtagagtatagagttcatattggaatttagaaccaactaaaattcgaaataaaaaggagcctccacgttcgctctcatggcctagaaattctcacattaatcagagaaaaagaaaatgcagagtctatatagaaatacaatttagaaatagctgaaattcagaattaaaaaataaggaatattagaaaaggagactagagtagttattacacattagtagttttaaaaagttattgcaaaatttaaaattatattgtcattgtaatatattttaataatatagtgagaaaacatatatgctattatatgagagaaaatataatgatgctagccgcgcagattgtgcgggccaccatgctagttatttaacagtcaatttgtaaattcaagtcttcttttgcttcagatgatagtaatttgtctattgtcaatttttattgtaacttcaaatatttttctaagagtgaagtgcaccagcggtccctaaacttatgcgggtgtgtcatctaggtccctgaactctcaaaatatatttttggatccccgaacttgtcttgtgtgtcgtataggtccatccgatgacatggcatgccacggtgacgcctacgtgtcggtgaggaccccacatgtcagtcatatgtataaaaataaaattaaaaaccatattttctcctctctacctccgcgtcgaactccactgcctccgctcaccggcatgcgcgcgccggcctacgtgcgtaggctccgtcggctccgccacactggcctcctcgctgcgggcgaagccgtacccacctcggcccggccaggcagcctcagccggctctccgcgtcaagctccgccgcctccgcctccgtgccgcaagcgacgccgcactcgcctcgcccgaggccgcttcctcggcaccctccgcgccgcaagcgacgccgcggcttctgttcaattagcccgcatagttatggttgcatgcacgggcggcatgcattggattcccatgctgcgtgcatatgtagcatgcatgggcgcacgctacgcgcatggcggctagctccgcctagcactccgctggcttcagccgagtaacccgcatgccgctccacgacctccactctcgcctctcgccacggccaaggccgttccgcctcagcttgagctccggctcgccgcaagcgccgtcgagggaccaactccgcgcgggccacggagtcacctccgcgtcggcaagcctccgcgtccgcgcgcggctccatcgcctccgcggccacgcgcgactctgccaacgccgaggggctccggccgttgtggttgtccgcctcggcgttgagccacggctccgtcacctcagcgatcacgcgcaactcctatgctgtcaacgttgcgacctcgcgcggctcgccgtcactgccgccacgtgcgactccgccggccgcgcgcggctacgtcgcctccccacccaggcgcgacacggcaaacccctccacgcgacacggcggccagaccgccgcagctactcgctggcctccgctcggtagcacgtgtggatagatgcatgcagtgcacggctctattcacgtggcaaggtgcaggagcgtggcaatctgcagccatgcctgcgttcggggacctatatgacacgcaagacaagttcggggacttaaaaatgcattttgagagttcagggacctagatgacacgcccgcacaagtttagggaccgctggtgcacttcactctttttctaatatcgaatgatggtgatatttttgttgttaattgttgagcttttcttgattcgttagaagtgatattatgggacacgcatgatattaataagaagatgtctataacaatcttgtctcaaacaatccgatatctatactactataaaaaataaaaaatagtaccggtggtggtcaccaccaccctcaactatcacgtgggaaaaatatgatagccgaatattctcattatgaaatttttcgttaccctaaacaatagaaatactttttttagaggcttaaaaatatatacaatgaactattttataaaataagctgttgcaatgtacggccattatgctagtaaaagcaaaattggccggcatatggaaatagagaatgcagtactggtgattggaatacctgaccgcatatgcagacgtcatccctaacgtcatcttgttaaaaggagggaacagatagcccacaatgatattcgccttgtctggaagataccttgtaatctaggtacagtactaaatcgttactacctccgtcccaaaataaaaatatttggatcttgatacggtctccgagatattattttaactaataatatatataaaaataagatgttttaaataaaaagagtggtatattatgatagtttgtttagtaataaatctaccaacattaattttatatgattgtttttttttatatttttactattaatagttaaagttaaaaatgttagatattttaggaggaggagggagtagattctttagatttttgcatctcctgtaaaggcagcttacgtatcgaattttgaaactaaccatgtttctatgccggtgtagtgcagactggagcaacggcgggcgatcgcgccgctgaattaatcggattactaattgacagcccaatgattttgcagctgcgcctccctcaccaacccacgacccgctgaatatgttagccactccatggctgatgccgcactataaataagccacacgccctccatgtatgcctcactcgagctcgaacaatctatatattgtcagagacgcacactttactgatcagctagttagtcccagttctgaagaacaactggaaaaagaaaatcgagctgtaaaaatattagtaccagtgatcagtgacagttcagagcatcaaccatgtcgtccaacaattccatggaggccaacaatggcgatgatgagaagaagcaagagcaggtggtgtgcgtgacgggagcgggaggcttcatcgggtcgtgggtggtgaaggagctcctcctccgcggctaccgcgtgaggggaacagccagggatccccgcaagaacgcccacctgcttgatcttgagggagccaaggagaggctgacactgtgccgcgccgacgtcctggacttcgccagcctacgcgccgcgttcgccgggtgccatggcgtcttccacatcgcctccccggtgtccaaggaccctgtaagctactcttggcttgcttgtttcgtcgagtattttaccaatgccgtggccgacgactgagctgcttgtccgtttttgctgcagaatctggtgccggtcgcgattgaggggacgaggaacgtgatgaaggcggcggcggacatgggcgtgcggcgcgtggtgttcacgtcgtcgtacggcgccgtgcacatgaaccccaaccggagccccgacgccgtcctcgacgagtcctgctggagcgaccccgaattctgccagcgagaggacgtacgtaaacatatgagtatttgactgtacaaatgtttatcagttcagaaatctgaaacgcaccgtacttgacatgacgaatgcagatatactgctacgccaagatgatggcggagaagacggcgacggaggaggcgtcgaggcgtcggctgcagctcgcggtggtggtgccgtgcgtgacggtgggtcccatcctgcagccgtccgtcaacttcagctgccaccacgtcgtccgctacctcaccggcgccgcggccacctaccccaacgccgtcgccgcctacgccgacgtccgcgacgtcgcccgcgcccacgtcctcgtctacgagcaccacggcgcgcgcggccgctacctctgcatcggcaccgtcatccaccgcgccgagctcctccggatgctcaaggagctcttcccccagtaccccgtcacttcaaagtacgtactccctccgtcttaaaatataacaaggttatactagatggagtctggatgagatatattctagtacatcaaatctagacatgggtatcctctgtctcaaaaccttatattggatgagatatattctagcacaacgaatctagacatatccatatctagatttgttgtactatgatggagagagtaacaatttttacactactccaaccatcctataaaaaaccaatctgttagactagtagaacacatcctattactacgaatccggacatacatatattaagatttatagtattagggctgtctttagatccaaactttggatctaaatttctaactttttccatcacatcaacctgtcatacatacacaacttttcagtcatatcgcaccaatttcaacccaaacttctaactttgggaggaacttaacacagcttagaatgtgtcacatctgattctagattcatttttaatgtgatgaagagaatacgattattgccatgacaagatcgatctgaattgttacaattaatcttacaatttgcaggtgtgaggatgaggggaatcagatggtgaagccgtacaagttctcgaaccagaggctcagggatttgggtttggagtttactccactgaggaagagcttgcatgaggcgatcgaatgtctgcagcgcaagggtcacctgcctgttgtcacggtggcacaacagcgtgcatgtttgtagaaccaagattttatacacggtgaacttccaagttccaaagataataaaagcagagacatgacagcggcggcatatgcataacaaatttatattttggcggcggcttaaatttgaaattttgtctacctgaagaataaagtaggagtaccatataaagggaagttcagcgtggaagaacccgtactactactactcctagctagccagttcatatcgtaaatctgcatgtgtaacacaagttctttctttggtatgaattacatctgtatctctactttgttcatacttctacgatataaaatgaaaaaaaatattatataataccgatcgagaatgtatctaagaaacaggaatgaaattaagggaggaatagcgcacctctcctctactctacatgcatcgaaaggattctgcaatgaacactctctgatacaaagcattctgcaatagtagtacaatgagatttatttggagagtgggagaacacaaaccaatttatctttggatcttctaacaacttgccttccacttggctcatcatcactttgttcggtccatacaaactgcgtgcgtgcttgggccgcatacaaactgcaaggggtgggtgcccacgtacagggagagcaacgcaggagaacaacaaacaaattgggaaaaaaaatggggatctgtggggttcggagaagaaaactccgacccctttggatatatttgtattcgcctcgatcaacatctacgggagcgtgtgattagttccgtttagcaactcacacattcagagcgtacgcagactgtcgagtctgtggttccaaccataaaccacgtctgcgatcggcagctagcaagcatgtgcatgcttgcttctatgctctccagcattcaggtacatattttttagataatggaatataatatcccggcctttgctaaaaagaactacagccaattattacaaagatccactccagaagagagtgtagttcaagacaagttgaacacacaaaacaagagaagagatgacccaaactgagaaaagcaaaacaaaatgtggagctagaaggcctcatcaaagcctaggactgaagtttgccaatgcatagaccaatggcaatatccttgcacgaagaggtttttccaaagcggtgcccccaaggaggatgcgacgtggatcgccgccaccgcttgttcggaatcgaagcaaggttttcacccggagaatatggtagggaaagaaaatgggtatgctaaaacaacgcctctaaggaggggaacgacgccaaacggcgtcgccgttgtcagccggccaaatggctcggcaaggctttcgcccgcgattccctgtccaaacccacaccaccaatccgcacaagaagaatcgtcgtcggtcaacaacattgtcccttcagcgattcggccaagaccaccgcccacagttcttcccgccgtcgacgacgcgcccgcacccggactcctccttccccgcctccacatatcacctccgccgatgacgcaccgtcagtcggatgatggccttcaaccatcgccgccataggtaacatcgtcgatagccgccaccgtcactgccacagccaccaccgtcagccaccatcgccatcgccaccgccaccgccaccgccacccccgtccagccgccaccgtcgctagccagggccaccagacgccagacgtccagatccggccggggtgacgcggatcggaggtgcagcgcgacgcgcgggtcgctggcatcatggaggaaggcgtcacgggcacggcgttcacatccggagcaatgacgagggccggcgtcgcggcacgagccgcagtccgccgccgtcgtcgccaacttcgtctccaccacatccgccaccaccgccgccgctagccaccccccggcgtcgaccgacgtcgccggtcaccccggccaagcggggagaccagatcgtcgcccgtcgctggagccgcatagccccaccgccacgccgcccgtggagcgcccccctcccccccgctgcgctgtcgccgcgccgtcccgccaccatcgtcgccacgcccgcgccggggcgaggtggagccgaggaggatggccccgccgccgccatcccagcgcgtcgcccggctttgccggcgactagctccggcggcggcgaagcacggaggagggaggaggaggggcggcggcagcggcggctagggtttcgcctccgccgaggggctgggttggggcgatcaggtacatatacgtactgaacatggcaaaggcattttgcagaacttgaagcttcaaaaatcacatgtttaagaattaagagaaaactatccaaggaaaactaggcctagtttaattagggggggagggataatcgagcaaggaaacagcgcagtctctgactctgagaactaaggaacgaatggaagaaaaaagagtgcgatatataggcaggtacatccgaggggacacgacagccaagccaaggctgtgtttaatttttgaaaaaagttaaaagtttggagaaagttgaaagtttaaaaaaaagttataagtttatgtgtgtagaaaagttttggatgtgatgtgatgtgatggaaagttggaagttaggggtgaactaaacacggtccaagcatggaagctaatttcatgtccccttcagttcaatggctacgttcatttgatcatttcatctattagcatcgattctattgctagctgcaggtggccagagagaggaagagaggaggggaagcggacgggctaggaagaatgggaactaatgggccggattgactactttgctacattggatttagatgggctgaatttaccttgggttgaagaaattggaaaattggcggtccaacggggtttggaaaagaaaactccgaacccctccgatcacactgctaccgtccgattcatgcttaattagattcaacggtttcgttgagaacagggctgtccagcttcgttgtactaggtccttttagattattttttttatggagggagtatttttcttctcctctgagacacgcgtgacgtgagtttgtgacggttgatggtgatgcggtggattgcgttgtctaccttgccactcaaacgttacttaaaaacaggtaaagaaaaaaaaatcacctgtacccgtattcatgatgcgtcgtgattcacgcacatacatttgacttgcacgacacattcaaattaaatttgacttgcacgatactttcgagtcattgcattccttgttaagagaaggtaaacatggaacccacccactccaacattggaagatggaagcaaggtaaaaataatactcgcaagtcaaattgctcgatcttcacatgagcgatcgataccggccggtgtataaatacatgatggcagtggctgcaggcttatacacaaaattaaaacctcgatcgatcgaacaacgacaatctttcaactagctctagctcggcatcaccatcaccatcaccatgtcgtccatttccaacgacaacaatggtgatcagaagcgacagcagcagcagcagctggtgtgcgtgaccggagcaggtggcttcatcgggtcatgggtggtgcgggagctcctcctccgtggctaccgcgtcagggccaccgtcagggaccccgcggaccgcaagaacgcccacctgctcgcgctggagggagcccacgagaggctctccctgcgccgcgccgatgtcctcgacttcgccggcctcctcgccgcgttcgccgggtgccatggcgtcttccacgtcgcctgcccgctgtccaaccgcgatccagtaagctcgctaccttttcccctgcttcttgcatatatatcttttcttatttgaaccggtactaaagatagcgatttttggttccgtattcgtagccccgatttattatctaggattatagaaggttacaaaccgggactacaaagggtttgtacagcagttgagctagctaaaacaagctgctctgtgccgcatgcaggagctgatggcggtcgcggtggatgggacgaggaacgtgatgaacgcggcggcggacatgggcgtgcggcgcgtggtgttcacgtcgtcctacggcgccgtgcacatgaaccccaaccggagccccgacgccgtcctcgacgagtcctgctggagcgaccccgaattctgccggcaaaaagacgtcagtctattacacgtatacgctagtagcttgtttgatatgcaatccagtttatatggttacagaaaaaataaaacgtacgaaatgtatgtagatgtactgctacgcaaagacgatggcggagatggcggcgacggaggaggcggcgaagagggggctggagctggcggtggtggtgccgtcgatgacgatgggccccatgctgcagcgtgcgctcaacctcagcagcacgcacgtcgccaactacctcaccggcgccaagaagtcgtacccgaacgccgtcgcggcctacgtcgacgtccgcgacgtcgcccgcgcgcacgccctcgtctacgagcgccacgacgcgcgcggccgctacctctgcatcggcgccgtgctgcaccgcgcccagctcctccagatgctcatggacctcttcccccagtacaccatcgcttcaaagtaagcaatcccaatgcttgttctactaattaattagagatgcaatcgatggatctcccattctcacgtgtatatacatgcatgtgttttcttggcttggcaggtgtgatgacaaggggaagccgatggtgaagccgtatgagttttcgaaccagaggctcaaggatttgggcttggaattcaccccgttgaggaagagtttgtacgacgcagtcatgtgcatgcaacgaaacggtcacctgcctgtcgtcttgccatagcaggagtgtagatccaagatatatataaaagacgaatttatgaagatattgtttgatagctaaatttggcaatagagtcaagtttatagtaagtttgagccaaattcgtaaaataccagagctttcccgcgaaggccggtctggccaaacaatccactacagttagatcgcaggtgtttgggtacggtggtcaaactttttgcacgaagtccgagtcccatttaggtatttcctatgttttcttgttttagaccggatttctcgagtcctaattgatttctaaacctaattagatgtgggaaagactctatgaaacaagtccacccctccaacaaaatatatgggggctaagaccaattgaaacaacaaccaatcaatcggaaaaattaatttatcgtccaaacctctttcttattacctatcccaaagtctattctcctccaatcctctaattgctcgtcgtctcttgaatctacaatgttagagaatgtcctaactggtctaccgaatatagaataaaccggtgcacgtccgccatgacggtgtccccctcgggtattcgttcggcgacatttacccactccctagagcagcatgtctccaggtgccgccgcgggttgcacataacatgctcgaggtgtggtggcaagattctatgttaacggatctacaataagaaaatttctcataaattaaagaaaaccttaattaccggaacttgtacaccaacctccttctaagttctaactagacagtatactctttgcttagagttacgcgacttattcccagttgtgttttagattcttaaataaataagaagtatagttacctcttgagaaaacctctatccgtttttttttcacctaaaaactcattaagaaatttgataggtgtatcaatatataacgtatcgctctataaacacgtaaattcaaattcgacatacataagcagagacaaaaaataataaatttgactacgaatagtatgcactctatttatatttaatttttttagttttcacagttaaatgtgtaaattcgagtgcaaatagcaaacattattcaccgttgctcactgttcaaaatagaaaacaaccagggttctcaaatggccagttcagattgtagccaaaataaaccttaccaaattttggcaatttgctaaaaaatttgcaggatttcttatgtatttaccaaatctagcaataaactaaacgcaaacatttttttaggaactataaaaaaatatatggttgaaaatgacatcaatctgaacaaccccatagcaaacacgacactttttaattgaaagtgcataggggaacataagcaaatatttctttttttttttgaaatcaggtaattttcattacccagcttgtaaaccaagcccagaacagagtcttacacaaagttaatagttcttttcatgggagcataggatagatgagaaaatccttcaaagggtgaaagtgaaaaagggcaggtacgtgccacatgtttgctcttttggacgcgtggcctcccgagtcccggtcatcagagctgctgccgcgcgtcgttctccctctctgtctctcccccttcccattccctcccgtttccgtacggcgggcgggcggcggcttctcgctatctccgacgacagccgaggtgcaaacccccaccggaagctaacggaatttcaccttcccctccctgagtctccccctttgctagcttgcgcgcaattcgcatcactaatccagtaatccccgagggattagtgcggtgcgggggttttgcttcttcaacctccacggcggcacgcgcgcaataggcaaccttatcattcttgagaagttatcgggaggtggtatcatttttttccgtgtaaaacttacatcgtcatattttctcaagatataactgtaaaatttcatgctaataacattcgctttgacattaccattttttggtacacattaccttattttggtgcgcattgtatcatttgtatgtatgattgcgtgacttcctttcccaatgctcccaattaaagttttcatcagcttatataataattgataatctgtgcgtgtttatgtatccatggtgcattggtttcatgcagaggagatggccccaacacgtgcgatggggtgctccagaaggatccatgtggtggtcatagacacaggagacaggctaagctcgttaccagatgacatccttcacaccatcatgtcgttcctcccggcgtggcaggccgtgcagacgtgcgtgctgtcgcggaggtgggagcgcctctggtgctccatgccatgtctcaacattcgtggagattatgggtaccccatacctacatggcatagttatctgactggctataggggataacttatatctatggaatatgtaacagatcatgacttgggtattacgtttccctgtatattatggaacggcctaaagtcctggtttgagaagattgtaaagtagatttaggaaaccgataccgtattggttaaggtttctatcttgtaaccctgccccccaacctatataaggagggcagggagcccctctaggggcatgagacaacctgatcgtcagatcaatacatactcggcggattcaaatccccaaacaggagtagggtattacctctcattgagagggcctgaacctgtctaaatcctttgtctccacatccatccacttttaggtctcgtgcgctaccccgttttattattgccgaattcatgtttcgacagttggcgcgccaggtaggggtaaacgccgagtttcctgacgacgagtgcgatggaatcaactttatgagtcgccggcttcgtcttcgctttgggagctccttgattcctcgccgccgacgacttcaacaagacgaatcgttgctgctattctctgcctgatcttgttagcatcagcacgatggcaacgacggggcaacgacagttcgacggatttgatggtcgtcctcgtccaccaccaaacctactggtccaatttacccaacgaggatgccatggtgttgcaagatggatctacaaacacgaagcatgccaaaaccgatctaatcggatgcataggagacggctgcagccacgccgatgccttcctgccgtcctgcgtcgtgctgatggacaccaacgccgcccgcgactgcgacctccgcctcctccgctccgtctcggagtcagtcgaagagatcaatctcggcgagttttttccttttaatctctgacttcgccgggttttttccttttcaacttattgttgtttattagattgatctctaaatgtcagattaatctctcttagtattttctgctgtttgcatgtaacgccgcggcactactcttgccgactggtgtttccgtctgcatggctggcctattaagccgccgctgttgggcgtctacgacttcaccgccggcctgcctccgtcgccgccgattggtgcctccgcctacacggctgatctattatgccgccgctgttgggcgtctacgacttcaccgccggcttgcctccgtcgccgccaattggtgcctccgcctacacggttgatctattatgccgccgctgttgggcgtctacgacttcaccgccggcttgcctccgtcgccgccgagtggtgcctccgcctacacggctggcctattatgccgccgctgttgggcgtctacgacttcaccgccggtttgcctccgtcgccgccgagtggtgcctccgcctacacggctggcctattaagccgccgctgttgggcgtctacgacttcaccaccggcctgcctccgtcgccgccgagtggtgcctccgcctacacggctggcctattatgccgccgctgttgggcgtctacgacttcaccgccggcctgcctccgtcgccgccgctgttgggcgtctacgacttcaccgccggtttgcctccgtcgccgccgagtggtgcctccgcctacacggctggcctattaagccgccgctgttgggcgtctacgacttcaccaccggcttgcctccgtcgccgccgactggtgtcctcgcctatacggttggttggtcacaccaccgttcatgggcgtccacgtcttcgccgaccggctggccttcgccgccgccgactggtgtttctgcctacacggctggcctattatgccaccgctgttgggcgtctacgacttcaccaccggcttgcctccgtcgccgccgactggtgtcctcgcctatacggttggttggtcacaccaccgttcatgggcgtccacgtcttcgccgaccggctggccttcgccgccgccgactggtgtttctgcctacacggttggcctattatgccaccgctgttgggcgtctacgacttcaccgccggcctgcctccgtcgccgccgattggtgcctccgcctacacgggtggcctattatgccgccgctgttgggcgtctacgacttcaccgccggcctgccttcgccgccgccgactggtgtttccgtctgcacggctggcctattatgccgccgctgttgggcgtctacgacttcaccgccggcctgtctccgtcgccgccgagtggtgcctccgcctacacggctggcctattatgccgccgctgttgggcgtctacgacttcaccgccggcctacctccgtcgccgccgagtggtgcctccgcctacacggctggcctattatgccgccgctgttgggcgtctacgacttcaccgccggcctgcctccgtcgccgccgagtggtgcctccgcctacacggctggcctattatgccgccgctgttgggcgtctacgacttcaccgccggcctgcctccgtcgccgccgagtggtgcctccgcctacacggctggcctattatgccgccgttgttggatgtctacgtcctcactgttggctcaccttcgttgccgtcgactggtatttccgcttacacggctgacctattatgccgccattagtgggcatcttcgctttcaccgtcgaccgccttcgtcgccgccgactggtgtcttcattgttattgatggacgactttgttcccacattggccacttctgccatcaccaaggggaatattacaaagctaagtcatcatttattttattctttatatgatatttttccttttcctctgcctcactacaccaattggtcttccattgagtagtgagtcgggggctacagatgttatatcatatttttcatagtatttatcttgattgcttgcgacataatctgagtacaaaagtacctatcgagttatggagttctatcttcctatgctttccgtttggtttgccaatggatggttgcctttgggccgattcctagcacccgggggctcgttggatggaccgagtaacgcaaggtgctaagtattattcggaataaatcaaaagcatagagatgagataaatttattttctgctcttaataattgcaaaagtacccgagtagtaaattctgatccgtgaaactttgttccattaatgacgaactcatgtcactcatatgcatgtttgggaagtgcctaggccgactcccggtgcttgatggtcatgactagtcggacagagtgtttaaacgtacagagtcatctgctcggggaaatcaaaattgacaagaggagaaatacatatttataaatattttaaaatacttgcatttttctcgagtattatatttatatcagatactactcatcctatatgtttgttctgcaggatccagatccagatatgcataaaagggattcatggctttaagcttatctcttacgctccaggaatggatcagtcagaacatcacccccggctcgcctcgaccgccgccgactggtgtttccgcctgcacggctggcctttatgccaccgttgttgggcgtctacgtcttcaccgaccggcttgccttcgccgccgccgactggtgtttccgcctgcacggctggcctttatgccgccgttgttgggcgtctacgtcttcaccgaccggccgcctcgtccgccgccgactggtgcttccgcctgcacggctggcctattatgccgccgttgttgggcgtctacgtcttcaccgaccggccgcctcgtccgccgccgactggtgcttccgcctgcacggctggcctattatgccgccgttgttgggcgtctacgtcttcactgaccggcttgccttcgccgccgccgactggtgtttccgcctgcacggctggcctattatgccgccgttgttgggcgtttacgtcttcaccgaccggccgcctcgtccgccgccgactggtgcttccgcctgcacggctggcctattatgccgccgttgttgggcgtctacgtcttcaccaaccggcttgccttcaccgccgccgactggtgtttccgcctgcacggctggcctttatgccaccgttgttgggcgtctacgtcttcaccgactagcttgccttcgccgctgccgactggtgtttccgcctgcacggctggcctttatgccgccattgttgggcgtctacgtcttcaccgaccggcttgccttcgccgccgccgactggtgtttccgcctgcatggctggcctttatgccgccgttgttgggcgtctacgtcttcaccgaccggtttgccttcgccgccgccgactggtgtttccgcctgcacggctggcctattatgccgccgttgttgggcgtctacgtcttcaccgaccggccgcctcgtccgccgccgactggtgcttccgcctgcacggctggcctattatgccgccgttgttgggcgtatacgtcttcaccgaccggcttgccttcgccgctgccgactggtgtttccgcctgcacggctggcctttatgccgccattgttgggcgtctacgtcttcaccgaccggcttgccttcgccgccgccgactggtgtttccgcctgcacggctggcctttatgccaccgttgttgggcgtctacgtcttcaccgacgggcttgccttcgccgccgccgactggtgtttccgcctgcacggctggcctttatgccgccgttgttgggcgtctacgtcttcaccgaccggcttgccttcgccgccgccgactggtgtttccgcctgcacggctggcctttatgccgccgttgttgggcgtctacgtcttcaccgaccggcttgccttcgccgctgccgactggtgtttccgcctgcacggctggcctattatgctgccgttgttgggcgtctacgtcttcaccggccggccgccgcatccgccactgactgatgtcaccgctagcacggctggcctgttataacgccaactgatgctatcttctttacggctggctacatcgctgtcactactaataggcatcagtatcttcaacacaagctgcctacgtttgccatggctgccgactggtttcttcacttccatggctgcatgattctgccagtgttgatgggcctattatgccgctgttgttgggcatctacatcttcatcgtcggtcgtctcgtctgctgctgactagtgcccttacctctacgtctggtttatacagctaccactactgatggacatcatcatcttccgtcgccaactgattatgctgccgccgattggtgcttttatcttcacaactacgcgtcttcactaccggtttgcttctgttgccgccgacttgtgttcacttcattacggcaatacaactttgtcatcatggtggagcgacttcatctttattatcttcggcaccggcaaactctattgctgctacttcgcaagttttactacttcaccaaccacgacgtctttgtgaacctcgacatctcggcatgcaatgccatgatattttactacaacaagtgactctccaatattcaggatttctacttggacaccttcaacacatatcttcaatcaagcaatgactactcgacgacaagaagctataattctcgactctatgttcagttgtttctcaactaaccaaagagtcgggggctatacaaatataaggctcaaaatttgacaaattttatgtcaagctgaagaaatcaattaatcaaccaatgagtcaactccaggagtcattatcttcatctttgcttcggaacagacattctacttcaacaacttcaaatatttcggtttagacgagttgggcaacaacatcaactctcctccaattatttgtcttcacggttggcctactacgcaactgccgatagaggatctcatcgttatcatcggctgctacatcgctattgactggatcaccgacatcgtcatcttcatcaacatcttgtcaagcctcatcaacatagccaactctgctgccgttgatgggaaacttcgtcatcatagtcggctatctctgttgccgctaatcatcattaccgtcggatgcgtttgtcgccgccgattattttcttcatcttcatgattggtggatttcgccatcaccgttgatgcgcgtctacgtcttcatcgtcagtttgcttttgtcaccaccgactgttctttcgttgttgttgggcgcctacatcttcactgctagctgacctgactgttgccgactggtttcttcacctccatggttatgcaacttcattacatttgattggtggcatctttactaccactgacatcttccgttacttatgatgagcaatttcgtcttcatgttggtcatttcatctccatgacgactgcgtcagttattgccaatagacaattttgactatgacagaaggacaagctatatgctcaggggctcatcaactcaagcgtgaggattatatctccaatttggacttgttccggatacattccacatggattcatagtcatgagtctattttctatgctcaaagactggaccaattattattccccgtaagggctatcaaccgaatacttgcgccagtcgggattcaattattatatttattttggagtatcccataagggataatcattcagatcagaagctattcatatgagctacacttggtctatattacccggaagatttattactcgggagcatgttacacgcgtcatcctttaaagggtgtcgaaggcatattttttggcctaggcctaatatgtctgcagcccatattttcaggtgtggcctgtcacgttcttttagggacttaggcactttttgcttaggccaaagtgcgcgtgatcaagtgcccaataccttaaaatccttttataccgcagttactcaactttttaggagttggtacgatgcatcttaaaaggtgtcaaacagtaaagctttatatagctggcccgctgacttttttatatataagtcaaggtgctgtttgggtttttaagcaattgattagatacaatatcattgcttttcgccacgtaagtgtgtatttttattgaccaatattatggcttaggctgattatatattgtggtcatttttcaggcggttggtaaatcctttatgagtttatttacttggattttataccacatatgccatatatttccgggtgtggtgaaaccatgtgtcttttagggacttaagcacatctgttaaagcagtgtgcgcatggcgtatgcccaatactttggaaatttctttattcacaatatataagcttctttatagctgttttgctatgtgaattttcaatgatgtaaccaactttaggttacactcatcatattttacaaagcagtcggtatatcacttggatcatgttattcagggattcacaccgcatatgctacatattaatatcaggtcgcttggttgactataattattaaaaccactcggttggttggattatttattccttgactatatgcttggtttgttcaattaaccacatagtcgggggctacacctattaggtgcatctagtcgatgcacctgactttatttttcagccctccacagtcttcgtatttggtaaaagtacttcggagaccatggcgaagatgattgaagcactcagctttggagtaatctagttcgagagaagattatcttttcgactgtgaaggtctcaggggctactgtggagattatgggtaccccatacctacatggcatagttatccgactggctataggggataacttatatctatggaatatgtaacagatcatgacttgggtattacgtttccctgtatattatggaacggcctaaagtcctggtttgagaagattgtaaagtagatttaggaaaccgataccgtattggttaaggtttctatcttgtaaccctgccccccaacctatataaggagggcagggagcccctctaggggcatgagacaacctgatcgtcagatcaatacatactcggcggattcaaatccccaaacaggagtagggtattacctctcattgagagggcctgaacctgtctaaatcctttgtctccacatccatccacttttaggtctcgtgcgctaccccgttttattattgccgaattcatgtttcgacaacattgatcagcaggagttcgaggattgtggaagggacagggaaggtggcgggtttgaggaattcgttaacaacatgttgatgtttcacagtgccccatcgttggatatgtttaagtttcatgttacacacaattacgactataaagtagtcgaccgatggattcgccgtggaatcaagtgctgccctgcagtggtggatatatgtaattcttccaatgctcacatgtatgaactacctaatttaggttccggtgctcgtcgcctcaagaagttgcatcttgttgtgattgctttggtcaagggtttcacgcagcacctcccttctgcctgtcctgtccttgaagacttggagcttgacaaatgctgtcttgaccatccggaaatcacatctctctctgaagaatttgatactcattgattgtacaacttactgtggtaaagtgctgaccatcacaactccggctctcgtttctgcatcactttgtttaagatatccccccccccccccccccggggactagaagaaacttaccagaaggaccatgcaagattcttcgcaacgtaagcaacttgagaaatttagagctatctgggtcaaaaacattggtatgttttttttcctgttagtattatggcattgtttgacatactgctcattctcatgaattgtcgattagcacaaattattaaactgtatttactatttagtacctatattaatttctataaactcttatgcttcatttaagaagggaactgatgttcgatatctgtgatactgtgctaagaatcaacgtgtacatctggtacaagcaaaacatagtaaatttacatattgctaatgaattcaagaggataaaaacattccttaaaaatgatgataactatatgctgtttctatattcttctatgtagtcggtacttcatggagtgttggatattttcccaacattttataatctcagaaccttgctgttcaatggatgcgatctgagtgacgacttccagatactaggatgctttctgaacaatgcccctagattggagaagcttactctgcaatactgcaaggtactttgcgttttccttaatctaccatgcaaatctcatatttttgctatactatcttctgactacttgcatgagcactgtttattgccaaaagcttccagaaggttccaggaaaaggaatagaacggaaaatccgaagaggataactataaaatgtcaggacacgctaactttgcggtgtccaaacttgaagttgactgaaatcatgtacggagaagatgatgttcaccagctgtttggccttttgtctggcatttggaggaacctacagaagactaccatcgtccttacaaaagcttgaagtatctaaatcttcagtaccttttgcaatgcttcctgatattagctccttcgaaatgtagcatgccttatgcccttcctgttacttgtttgcgtttagtatctgtagatgtggaaaagacaaccgaacttaccacctatatattcgggggaactgaacccatagttctggatattgcatatgttgcatgacatgaaaattatcttgtggaatatcgtcggaaacacctttggtaatgaatgaatgttggcctaagatatgattgtactgatggctaatagcctatggccataagcaaatcttacgaacaggtttgcagactctgcgctactctgttttgatgtttgaacatctggataatttagaaataacatggcttgggagtgtagcgtggctttaccccttcctgccgtttggagttgcgtttagctgctgtagtagtttttttcctagtttcagtttttgttttgctttttttcttttcccctggtataagccggtctggctgattgtgttgttgtaacaaaaactttttttctttccaatatattgatgattaatccttttgcgtgttcgtgaaaaagaaacaaaatgatatgagccatagagcctgtcatttggtctttcaagagtaattcttggaataaaacaaggacgtccaatcctgcgtggagtaatttatttcaagcgcaacagggcatttgccacatgcaaaacagaaaaaggatgttgcaacttgcaacgaatggaatcgcttaatattcggggctttatgcgacaagcggaaacaccaacttgtctttctctctgtccagcacttcattttagaactttctgatatagcccttttaatatattttataaactaaaaataattgcttcaaagtaagtgtgtgcgtgtagatgagtggacttgtgagcgcttacgtttgcattgtgtttctaaacaaaatccttaatttgtttggctgagtggctttacattcatttctctatacgagcatgggccgcactataagggccattttgagagaaagcccactaacagagtaacccaacagcccaactgattttgatatacacggcccatcacggaagcccaagcctcacaaggtccagctaccatccgccgctcctcctaccacgctaccaccacacttgccgaacccacggcggcggcgacgacggcgcgagcgacccaaacctaaacctcccaacccctcctcctccgccgccgacgccgccgcagctgccatgtcgaagaaatcacgcggcgggggcgggggcgccgccgccggcgaggatcccgaggacctctcccgctcgcccctccaggccgtcctcctcgccgacagcttcacgctcaagttccgccccatcaccctcgagcgccccaaggtaccctcaaaccctacctccggtgggcacctccgccccctccctcccctcgcgcgcgcgcgcttgagttcatcccgctgcctcgcaggtgctgctgccgctggtgaatgtcccgatgatcgagtacacgctctcgtggctggaatcggcgggggtagaggagtgcttcgtcttctgctgcgcgcacgcacagcaggtcaaggagcacctggggaaggcggggtggaccgggaagcctgcggcgagggagatgaccgtcacggctgtggaatcgcacgacgcgatcagcgcgggcgacgcgctgcgcgtcatgtacggccgtggagttgtgagtgttcaatccctatccttacagtggatctctatgaacaattctagtgctaggattttggtgctgttatgacccaacaatattgtctcgtggtagacatttgtttagaagctagaactgataactgatgtgtagattgctgcacagtggatgtttttgtttgtgctatttggattcatttaaggaatagaagtaggaaaaagctatactggttctgtctaaatatttctctctctagttgagttcatcttagaaatcaactttaccactcgattctgtgaatacttctagtttgccaatctagtaataatgtcttgcatctagattattgttgtcccaagttgctagttgctacatgctgcagcctctgcttaactgttttgacatgttctgttctcctccttcaatgtagatacatggagattttgttctaatcagtggtgataccatcagcaacatgaatttgaaagacgctctccaggaacataaggatagaaggaaaaaggacccacttgctgtcatgactatggttataaagcattcaaaaccttcgatcctaacgaaccaaacacggttaggtaatgacgaaattgttatggcgatagatcctgagactaaagaactactgtattacgaggacagggcagatgtctcaaacctgtatgtgacaattgataaggacatactggccagtaatcctactctccaattgcataataacatggaggtctgcttttaaacttcaacacataatgtcttcttctttttttctttttgtaataactgtttctgttatgtgttgcaagatcacgcctaacattcttcattacttcaaatctacctacttttcacagatcttcttttacttatgttcgcaggactgctatattgatatatgctcaccagaagttcttagtctttttacggataactttgattaccaacatcttcggcgccatttcgttaagggtttactagttgatgatgtaagtccattcacttctgttgaacatctataatactacagattatgctgtctgttcttatatttctcttgtaacgaatgacctgcttcctgatcctttcagattatggggtataaaatatatacccatgaaatacgctcaagttatgctgccagaatagataattttaggagctatgatactgtgagtaaggatataattcaaaggtggacttaccctatggtgcctgatgtcctgtctttcggtgatcgtcaagaaatcaaacttcatcggcagggaatctataaggcatcaggtatatggaatgaaaataaatttccacaatgttgattgattttcacttgctcctagattcattgttctgaaattctagattttttctctcatgttatttatagagtactcttatttaaaattgtttagtttggtatctggttttacaaaatttcttgtgctgatgtgtgatttcttgctaactagtcatcaaatagcctaaattagtatatttatttcgtgtaaactaatggaaattgcttctaggtatatatgtatgttccaaagatgcttagtttgcaggtcatcatgtttatctgttacgcaaatcattcagtgaacaatgaaagttatggttgcatagtgagtgtaacgattcatatctaacttctatgttatgcttctttagtattttgtggggctgttgttgaatttttatttttatttgttttaaaatatcttgggtatgccaccctgaaccccacccacccatcatttatgactatatatgaaagttcctcctggtgaagtaaatacaattatctatctatatatcaactgagcatgttttttttccagatgtaacactgtcacattctgcacaaattggtgccaattctgttgttggcaatgggacaagcgttggagaaaactgcaaggtatccaattcagttataggacaaggctgcaatattgggaaaaatgttttgattcatggatcctatatatgggacaatgtcacaattgaagatggatgcaaagtgagtaattcactagtctgtgatggcgttcatttaggggcaggggctattgttgaacctggctgcatactgtcatttaaggtatgttagtagagtatacatagttattttttaatcgtgaaacaatagtagaatattcctagttaatgatcatctccttatcctttgaacaaaaagatagccctgtggacaatatgctcatactttcatcatttaggttgaagttggaaagaatgttgttgttcctgcctattcaaaagtggcattgctccctcagccttcaaatgaagacagtgatgaggagcttgagtatgctgacaccaattctggagttacagatagtccacgttagtcataccttggaactgttatgtattcttagtaccagacatttccagttgctctaatgaggattttgacttgtaatatccatgttttacattttaatttgtgaactgtgtttctttccatgcagccttttccagcatgaggagtgctgaccacccaactgtatctgatgatgatgacttagaggcatcggaggtattactctactgttatttggtgactcagtgcaatggtcttttatgcatgtttgaaattgttcactgtgggtgaggaataacctacagatactttggtgatacattttttcattctcatgatctcataatcactgggtttctgtttacgatgctattgactagactggaacatgtggtgtcgttggttacgtatgggaaaatgttgatgctggaattcaggaagaatggagacaatcaattgctccaattcctaaagataagcttgaagagttgcagcatgctgcgtcttttgatgacgatgatgatggatcagaagatgactttaaaaatcggccaactgtactggaccaagatgatgattctgatgttagcgcggttgaggatgatgattattctaagtttgagaaagaggttattactgcataatcgaaaatttgacacacacacacacagctttttcttgttcccttttgctgatttgttgaccttatctaggtggaagagactttccaaagggcgttggatggtatccatcaagataacttgatactagaaattaatgcactcaggtataaaatcttaactcgtacttcatgcgtttcaaagttactaaatatataaagctgcgatacatataagtaagcatgggcatcattttgcgctctaggagatttcattttgagaaaccaatggcaaccgcaaacagagaaaaagccaattttacacagaaaacatatattttatttgacttcttgtattagttttaaagctcaaatataaagtagatttttattcttttgccaaagatgctatgataaagcgctccttttcttattactaaccaaattacccatgcattgtgttgggtttaaaactatatatattatacagttttttagaccaaagtcgatcacagattgatccagctttataacaaagcaaagacaggacattttcgtttacagccaacagagtactaaaaggaacaaacaaaagcagaaccaggctaaaaactgagggtaaaacgcctgggaactccagcttacaaagcatagcatcatctaacaaaaacaagcaactttagccccagcaacccgcagcaacgaacttcagatgtcgataggcaacacatcagttggtcttaagcttcgagtcttcgttgttagcctgtcaatgataccttccatattgtctcgtccttcttgtgtctggagcaactgtcatatttgtaactacccaattgccttgaagatcagctgtgcaggagatataatcaaaatattttcaaacacgaaatcattccttgtggtccacaaggtccagcatacagctgccagggtcagcacagaacaatttagctgtttaccacttctcttctctacccctattaacctaaagaaatcctcccagtcccgtggaaccatcccaaaacatctctcaccacactccaagtaaaatatgctacagggcaattatacaagatatgatgagtgttttcaacctccccaattcctcttcctaagttgcacagcactcaggcttctgtcccaagaaaccatatacaaaaaatgttttattttaaagggattttggttttccaaattatcattgttctactgtctttcacccctccaatagtgatcaatctatacagtgattttgctgaatactccccttctttcttatgtggccatatcattcatctctttggttgttgaactcaggtatccctatcatctctttcagcttctcaatatcttatcttcctgcctcaacttcttctaaagttactcccatttaccctctttcaccatctccttcaccagcttccctttttgggtacttattgcatgcaaactctgagaaaacactatataaagtgacatgtgcaacacaatttagtcgtctatgtaatatactacttcctccgtttcacaatgtaagactttctagcattgttcacattcatatagatgctaatgaatctatatataataatgtctagattcattagcatctatatgaatatgggcaatgctagaaagtcttacattgtgaaacggagagagtacaaaacaaagaggtggtggtgggatggcggactcaccactaccattaccattagcttctgttatacaatagagactattcatctatcaaagcttctctcaaaattttatgaccttatgtttagttctgtctatgctgtgtctatatccaccatagttgattgattttgtgcaatgtcatccttacttttcaggttatcttatagccttcaacatgcagactgtgctggagctttgttccattccgttatgagaagtgcattagtggctgcacaatctactaatggtatgtatttatgcttgtgaaaattaagtgagcagtagttacttttattttggcttttggacaagaatgttttatttagtccatattcagaccaaacccatattagttcaattccttgtgctggtttaatctacagattgagtttgaaacagccacaccctttgaaattagttgactgagtgaggtgctttagtttttaggccaaggttttggcattaattttgggagaaactgtactagtttccttcaaaatcatatgaaattcctctattccaaaaatgccagttccattctcattgtggaacccattgtgcatgcattcttaatttgaccatgcaagttatctatcatatggtttctgcgtgtttgtaatgaagtgcttctgcacttatgttatagattttagatccgatgacaggtaattagagtttttcctctgcttgctccccttctctacaggtaaccttctaaagacaactgcagaagcacttggcaaatggaaggacctactgcgaaattacaccaagtcagttgatgaggaggtatggctcaataactgaataaataccgtgaatacatcagtaagatgcgctgaatctttttagcatagttatgggcctgtttggcacagctccagctctagctccacccctcttggagctggagctcagccaaacagtttcagctccaccaaaaatgggagtggagctgggtggagctctctcacaaaatgaactagagttgtggagctgggtttaggcagctccacaactccactccagactcaactcctagagctaaatttaggagttggagctgtgccaaacaggcccatatatagcacatttatgtttccatgtcctaccaccggcaggtttaatcattttgaacttgttccgtactattttgctgtttaattgtttatttattcattatattttttggcaaaattggtttggtagcgttgaaagatcccaagttttgaaatataccactgaaaattgctggtgcatttaaatgccattcagagtttacaatgtttagatatataccattttctgtcatgtccaatgatctcatgtcacaaacgttaactataccttgaattgctcttgctccgctgattagaactttggtttgagatattcttccccaactcatttccttctcaagccttaggcaccgttcgttccagggtgtttggggagattgagtctcgttttccgcgcgcacgcttttcaaactactaaacggtgcgttttttgcaaaaaatttctataggaaagttgctttaaaaaaccatattaatccatttttgaaatttaaaatagttaatacttaattaatcatgagctaatggctcacctcgttttgcgtatcttctcaatctcctcaatccccttcccctcaaacacacccttagtgccttacctagttccttcttgttgattctactgtgtcgacactgaagtcgattcatgccgctaacttgattggtcactgccgatagtcaatccgccgttgctgccactggtgaagttgttgatttggtcccacctgctgctgatcctgtgccagtgacacatctatttctcctctcctctactgatcttctggtggtgatggcctatcgcatcacccatgggctcagctaagttcttggttagcacacagatgcagtatacttttactgcaggctgccagagtctgtagcaggccggaggatggtgcacaagctcctagtggggtggtgctggtggatgatagtgcagcaagagctgtagggagaaactgactggtgagcagtggccacaggacatcggcctcccatcagcgccagaggtgactcccatggtgacaacacatgggtcacgcacagtgtcaatagaaaggaaagagagcatcgatccaatccaggatccattgttggagcagttgattcatttttagcggtgtgtatggtactgtgattctagttatccttattccaagtttctgtccacataatcctgcttcaaggatctctctcgctatcttgcaacatgaaactagtattttccatagtttttgagggaaggaaaacatgtggtctgatcggttgtttctttaattttgaaatttctggcttaattgggatgtttatattttataatttcatgggctaaataaatcatccttttggtgcttctgtagatggaaatattattgaagttcgaggaaatgtgccaagaaaatacaaaagaattttctccactattttcaaaggtaaacaacttatcattgtactcttgttttgttgtgttttttttttgggtgtgtgtggagcacatatatcctatttgcttgcacactccttgtccattgaatgtccttgtgattctcttttggttttgataatacgctattgaacacagatcttgccttacctctatgataaggaggtagtaagtgaagacgcaattttgagatgggcggaggagaaagaaaatgccgatgaatctgataaggttttcgtcaaacaatctgaagctttcattcaggtatattaaatttgagttgcccttcaattttgtttgtgaacaaggtcaacagtaccaatagagtttattgagtcatcgtattgcaagtcttcagttaccatatcttcagctctgatctctgaggatatattgcttgagttgctctctgctggtaccaggtcttccatccaatgagaagagtttaatttgcatcacccgaacttttactattgtatttaaatttagctcgttctgtctatgtaatactggctgattggattttcacttatcttgacgaaagtatgctaatttccctccattttatgtattcagtggcttaaggaagctgaagaggaagatgaagaagaggagtagagctggagcttatgcttgcattcctttgagctcttggagaaatgcagcatttgccttgtttgaatggtctgccggtgagtttgcaagcggcaagttttgaaaacctaattgtttgtacattaatttaatggcatttttgttcctaaccaatctggtaaaagaaaggagcaacattgcccacgagccatgggttaaaacgactgtagagtgtagataagttaaaaccctttttcctatgtttgcttcgctgatgcttccatgaagttattttttccttctgatgaatttgtttaactgcccatctgtttctttgcacccagcacttgctcaaatctttaacaaaagcttagttagatatggctcctttggttctctcatctttctgctgagagatgtagtggggaagaaagcaatggagggttcttgtccaaaaggcgccaatggatcatgtgggttgcgtagatccggcactaatcttacctcaaaaggggcacggtttgtttaaagtacgttcttttttctccccaatccttttaattttcttcagttccctaaaagccttctatgatttgtgcaacaactgaacaagaggctgcaaaatcaaaggtcgatataaaaagagtgaaaaaaaaacagaacgtccttgagagccaaaagtggaaaagcttgtgagaatgagcagggcctgcgctaagcaacctctctgttcgggcttcctttggccctgttcttcgtcgcatgtgcacttgtaatttatccacttctaatacgggctggttggtggtgctggatcggcattgtttaatgttcagaagattttactttgaccataagaaacttcggaaaatgccgtctttgttaggttttatcctttcacctaaaataatctgactcggtttattcttgctgaccgtatcgtgatgtgttcaagattaccgccgaacaaacatcaccttgtcttttaccgtgggctcgtacaactgcagagttgaatcccaaattacaatctggacaaatgatgttcttgaccctgaatccattgtcagtaattctaaaaattcagagacaacactgcatggttgtgtaccatgtcttcgctaccagtgagcggtgagccgcacatatgcatctcaaaatatagttacttgaaggatttgaatttatgttaaaatatatgtatataaatattttttaccccatcccctcatctcaatagtactctatttactttttttcatctactttcttattttaacccatcgtaaccattaagaagtcatattttaagatgaagggagcagcgatcgttctcgtacacgacgttgccatttgagaatttgaggagtaagctgagctggtgtgcctcaggataaactgaaccgcatctgcatctgaatggaaagatagccgttgttggcagcatactactacaggataagctgtctgtcgaccaaaaggagtcccgccgaagcgtggcgtgggccacacacgagagatcccggagcctagaaagggagtcgcatgcgtttattatgttcttaacaaaaccgtcgtccgagtcagccaatctcccctctgacgccgtgagccttagcccttaagctttgcttgccacagcccacagccaccacctcctcgttctctccgtctcgtcgtctcccctcccttataaaacacatccaacccatgcagccgccaccgtaccccgcactcccgccgccgccgtcgtctacgtgagcgatcacgtcatcacatcgtcgtcgaccaaattaacacgcgtacgtactagcagctaagctgtatacatacgtgcatggattgcgagggggcggcggcggcggagatctaccggctgccggaggagtgcgtggcgtacgccatctcgatgacgacgccgggcgacgcgtgccactcgtcggccgtgtcgccggcgttccgggccgccgccgactccgacgccgtctgggacagcttcctcccccccgaccacgccgccatcctcgcccgcgccgacgacggtatcgccgccgccggcgaatgcgcctccaagaaggacctcttcgcccgcctctgcggccgccccgtcctcctcgacgacgccaccatggttcgtacgtttaagtaactaacagtaatttatcaatgtaaatcaattagaaatctgaatgaattctgaaatggtggttgattagttggtcgattaagataaaaccagctgctaattactaatctgctacttgcttaaagtgattagtgagattgaattgttgtatatcgatttgtgtgttgatatgatagagctttgggttggatcgacggagcggcgcgaaatgcgtgatgctgtcggcgagggcgctgagcatcgcgtggggagacgatccctcgcgctggagatggactcctggcctccccggatcaaggtaaatacaacttacatacagggtcaactatttgtacagagtcatgtcttgcagagaacaagtagctacattaattaattagtcttcaactgccagcttgcttgcctcgtaaaaagtattattgcaccaacacaatataattagcataatataatgccggcattttctaaacataataaaaatggtggcacacaccacacagccgagttgatgggactgcaaaacttggtcgtcgtcgttacctttcaatagattaaggctggttaattgattaaacctatatacactccgttccatcaatatgtgcgtgcgcacaacatgcatacacggagaatataatggagtagtatatgttttgtcaaaccgaccgaacaaagagaacatgcatacacttgtcagctcatgcatgcagtttcttcagcacgtgtgaaaaccttttccaggcatgcacgaagagctagacacgtaagctcagcacatcttgttgcattgacaacgacaacacaacatgatagctagcttatcgattgatcacgtcgtcatgcaaatttattaagctagacatacattaatccagatatttgatcacacattattatcgatgaatatatctatagattaatcataacttctcatgtccattaataatacatatgtttgcttaattttgatcgtcaggttccctgaggtggcggagctcttggacgtgtgctggctggagatcaccggcaagctgcagctctcgctcctctctccggcgacgacgtacgccgcctacctcgtctactccttcgccgactacaccaccggcctcgagtgcaacatcggcatgccgactcccatggccacggtgaccgtcgtctccggcgccggcgggacgacgagcaggccgccggcggcgccggcgaccacgacgacgacggagcagcacaagatctgcctgcagcacatgggggaggaggagacgatcatgcaccggcaggagctggtgatccgcctccgcaaggccttcggccggacggtgaggttcgatcccgacatggacatcaggtgcccgcggccgagggacggcggcggcggcggcggcgggtggagggaggtcgagctgggcgagttcgctgtgccggccgccggcggcgaggatggcgtggtggaggtgagcttcaaggaggagactgggcggtggaagacggggctcatcgtgcaaggcatcgagctaaggcccaaatgcaccagcaaattaattaaactcgatagctagctaactcgattattgatcgatcattgcattgcatgtaaatgttcctaaattttttttcccgggggagaattcgatcgatcagtgagagagcaaaccaataacgcatcaattaagcatatgtgattgattaagaagctgcttcaatctgatcatatatcaggctagacgagcatttgatcgatcaagcactagctagctgcagctgttttgcgttgtgacgtgttagcttttatgcatatgcatgtcgttttatcgtacatgtacacgcatgacagcatataagcatggctcatctaggtggtgccagaagctcagagagaacttgattgacagtgtgcatgctgcacgctcgtgtcatcagtagtgtagaaagtgttatttgctgtactcctacaattaatttgttccgcatatatttctagtgtgtgtgtgtgattgttgtccatcaattgtatttccattacatggaacactgtacctcattcctcaaagttgatagttatttgtttcaaatcaaacggacttaatttgtgcgcgcaattactactccttccatcttaaaatatacccctttgtttcatattataaaacgatttgattttttttctaatcaaacttttttaagtttgactaagttatagaaaagttaacaacacctacaatactaaattgattttattaaatctaacattgaatatatatttgatagaatgcttattttatatattacatatgttgcaattactaggcactgcactatcttaagtagtactctctccttcccaaattgatcatcatataattttatgtaccaagaccaacgacaatttaaatcacatcaatcaagacaccatgcacacattttcccataatgcatgcatcaattaaaatcccatgccaattacaccttaacatgcacatattatcatatattgcattaattacattctgatgaaatccgtatccatgcagttgtatgatgatcaatttgagaaattttgaattatattacatgatgatcaatttgggaaggagtgagtactaaattacgaatttatgtagaccttttttttggatagggacccaatcatattttgtgatggaagaagtactttttttcattttttactatttatgtatatatgtagtgtgatgtagcatcggtacttgtgtagttgtgtgcacatatatactccctatgtctaaaaaaaaaaactcaacttcttgagtttgaattttgttccataaaaaaccaacttctaccatcctacctaacctcagcacataaaacaaaaagttttatttcttcaatcccctttacctacctattacaattactacttttttttaataatgaaggttttttaataatgaagagcattttggtcattttcactctccggtattttttattgggatgctagggtttgattttatagaatttttttcatttttattttttaatatttacagcaatatggtaccggcgaaaatatttacagaagtagggagggcggcagggtgacgtgagggacgtacaagatgaaaaataactagaaaaatgcatttttggtagggcgaaatttgcatttgccctctttagcccttgtagagggcggcaagggaccttaatgcaaaatacgcgcaccttgccgccctccacttgggcggcaggagccatttctgtaaatattttggatagtataatatttctgtaaatattaaaaaatataaataaaaattctgattttatatgggatagagggagtacatcgctgggccttgccaggcaagcccaggcacgtaaagtagcagggcctggttgctccaggaaacaaaacagcggcccacatatcttctcctggccccacacgtcagttccccggccgccaccgccaagccgccatcgaatccaacacttgaatgaatccaactccctcccataatatccatctcgaattcgcgacacgaaaccacgcgccccgcgactccgcgagcacccagggtagccaaaccaccgatcgaggagtcgacgagtcgtacgtcatctcatccatggaggaggaggcggcggcggccgcctgcgagatcgcgcgcctgccggaggagctcctggtggcggcgctctccctcacctcgccgcgggacgcgtgcagcgccgccgcggtctgccgcgacttccgcgccgccgccgactccgacgccgtctggtcccgcttccttccccgcgacctcccgcgcctcgccgacggcgagctctccccgccgccgccgtccacgaaggggctcttcctccgcctctccgccgcgccccttctcctcccacacgaactcacggtgagatcccctgcagactcctggaaggcccagcccaacccgccaatgtgtgctcctcggttttttcttctccagtttcgcgtgcagatttcttctacacccaccgggtgatggcgaattgggtggctaatcagattgtgttgttgttgcttgcgtgcagagcatgtggttggagagggagaagggcggcaagtgctacatgctctcggccagggcgctgcaaattacttggggcgatacaccgcgctactggcgctggatccctctcaccgactcaaggttcgctcgatcatacatacatcgatgatgtcgttgacttttattttattcaattttttatgtaaaagtataagatataaattatgcttaaagtattttgagtgataaaaacagcttacaacaaaataaattatatttttgcataaattttttttgactaatgcaaatagtcaaacgtataataaaaagtcaacggtgtcatctattaaaaaaacgaatgtattatttttctgcctccttttccaatcctgctactctttacatcgtgcactgcttgcataaattaaaaaaaatgcaacttcgtttcgaaagaaaatggaaaaaaagggaaattctaagtataaataaatcttcttataacatatttaattatatcgaaagatcaagagtccaatgatcaagtcttttctattctcaatcatgatatcattattaaaacctctcatttacccctgttgtttcacacacgtccgtgttcttctaggatcagagtaggtagcctttacttgcaacttgagcctgtacgatcaataaattgaaatactttacttgaaacatataaatcgataatgcctgcatcttgttcatcacaacaacaccggtttcttaatcagctgtatatttcatggtcctaagctatctcgtgagctatttggagctgaacagaagctgatgacaaatccttagttgatacggcaaaatttatatggaagttgaaattcgtaaatactatgttgtatggttttctttggctcaattgtttgtattaattcttctgttactttgtcctgaattatgcaacaggttagaaggtgctgaactcctatctgtttgctggttggaaatccatggcaagatactgagcaagatgctgtcacgaaacacaaattatgctgcataccttgtgtacaggatagctgatagatcctatgggctggatttcccattccaggaggcatcagtcagcatcggaggaagcacaacaacccgccaagttggcagcgttgaacggaggctcaagcgaagatgctcccatgcgcttgttcttgcagaggatatagagcaccctcagaaaaggtctgacggttggatggagttgaagctgggtgagttgtacaacgaggaaggtgacgatggtgaggtgtgcatcagcttcagggagacggaaggccactggaagaggggtcttgttgttcagggcattgagattagacctaagaaaactctaacctcgaactgtcttgcttgctcccatgagaaaccctcttactcactgttgacaacgtcgcggtcgtccaaggaggaaatattccttacagacgggctcacagtaagacccttagcttctttaattttcacgttctagatctgtgtatgtttcttgattgatcgatctaataaggtgatgtgtgcttctgtatgcagagtatgtggttagacatggagactgggtttaagtgctacatgctgtcggccagggcgctgcagcttgcaaattcgacggacacctggcgcttgatctctctcactggtgcctccaggttgttcaactatgcccctactttgtttgcggagctcagtttcataaaatttacaaagctattatactctaaatctctaatgcttttgaaaggtattccatggtaggcgaaattgccatatgagtttgagttgtgatgatagatgaaattactttttttctttgcggggagatgaaattactttttaacaaaaaaatataagaacttgtgcgtctttacatcaacatatggaagagggttacgaatggtatttttagtatgcacacaatctttgttgaagtgattctgattacatggtcgagaccaaagttgaagttgttttagtttggaaagtgggattctgctgtactgtcgctgctgatcctctcctgatagttcctgttgcacatatttgagtgtttctttccttttgtctggagagcaaagacatgttccttacaactctgattttgtaaactgagtaatacgccactttacatagaagagaccttataatacagctttcatgtatcttgttgatcacaatggacttcttgaacaatatctattgccagtcttaaagaaaaagttatatctcttgccagttgccaatcatacagagctaagcaaaattagtggacagaagcttggtgactggcaagttatatggaaattaattactgtgtcctatggttttctacctgtgtgtgtgtgtgttttggaacgaacctacctgtgtgtattgagtttatatatatcgatttgttacatgtgtttgcaccaggttctcagaagttatcgagctcccagcttgttatgaattggtgatctgtggcaagataccttgcaagatgctgcctggaaacacaaattacgctgcttacatcgtgttcgtggtagttgacgattcattcgggctggctacgatcctggatgcatcagtcagcgttgggggaagcctatgcacaactcgccaagtttgcttcgacagcaccagcagcctgagcgctgatgagcattttgttgaagacaacattgaggtgcctcaggatgggagtgtgattctccctcaggagagggatgacggtttggatggagctggaggtgggtgagttcttccacaacgaggagtgtaatggcgatgtatgcttcagcgtcttggaggcggaagatggcaggtggctgagtaagagaggccttgttgttcagggcatcgagattaggcctaagaaatccggctgttgatgatgacatccaaagtagcatcgtgaccaatgtgtaagtatataacaaaaaacataaatctgtgatcaatgtactgccgctttttttatctgctgcatgaaatgatttgtattatggttggagtttctgctgctactgtccatgcctgttcacgatctgctggcatttgtgaaccatatgcgtgtgaaaccgagacgaagatatgaggtcaatataacatacgatcacttctttatgtggatattcgcctgcagcaaaactaccaaataacttaattatagagtacaagaaaaactatgggcgcggtccatagtttattagtttcatcgttagggttggccagcgaacgtctcctaaccaaacgcggttggcgaacgaatcgatatatcatgctcatgctcgatattttctccttctctctgtaggtcgaattgtatttgagagagagagagatggagagagagaggaaggaaaacgatggaggaggcatggatcgatcgcctgccgcaggatgtcctccagagagtgatccccctcgagacgccgcgggacgcatgccgcgccgccgccgtctccccggccttccgcgccatcgccgactccgacgtcgtctggggcaagttccagccagacgattcgtccctgcagctcgccgacggtgagctctttccgccgccgcgttccaagaaggagcgcttcctcgcctctccgccggcctactcctccttccagataggctcagggtgcatacttatttgcttcgtcgatcccttctcgtcttcaaaactgcagctatctcttcgtcgattcactcctgtgttgtggcgcagggcatgtggttggacagggggaccggggccaggtgctatatgctctcggccagagcgctggtgattatcactggtggagaaaccctttgtagtcccggttcgtaacccccctttagtcccggtttccaaaccgggagtaccaatccgggactaaagatcgctatctttagtcccgggtgaaataaccgggagtaaagatcgatctttagtcccggttggtaacaccaaccgggactaaagatcgagctgacctttttttttttttgcatgcccctgttgctgcatggtttatatatatatatatatatatatatatatatatatatttatatatatatatatattatatgtatatacatgcataatatatatgtatttatacatatatatgttatgcaaatgcatatgtatatagatatatatatgaacaaaatatatttacattatagaaaatgtgtacacatgcatatagaaacatatgtagtcatgtattaattacaatccattatatgtcctagctagctacgatttcgacgtagtagtactcgctgctagctcagaagctaaggaccggtgaattgtgtttccgtcgtagtagaattcacccttgggatcaaggatttcttcgttgatgaatcccatgagttgttcttgaaccgccgcgataaattccttgtgtgtggtcagattatccctcatgcgaataaactatatgaatgtatgaaattgattagtaattaaacaagaaatcgctacgtaatgaaattttgaatttatttgtacgtacatcgagctctcttgtggtgatgatttggtctgcaaggcagtggcaatactcgcacacgtaatagccgcacaagttagttccctgcttttgctttgcgcactacaaataaatgacaaacaacgagagatctaattaatatacacttgtatgtatttgaatcggagaaatataaatgtagagcatgtgtactcacaggaaatttgaacttccgcctaagtctttctctccatttgccgcggaccaaatgacggaaccgataccaagccctacatggagtttaaagctatgattcgtagtagcaattaatataacaagattttcttaattaacaaaggaacttatgacggtacctgtctataagttcgaaaaccttgtcaaacgtagactcttttttatccattgagtcatatacgttgacggtgcaggcctccaggtcgatgagtaaaagcacccagtggaatctgcaatgtgcgtgggatgcattacatatgaaacacttagcaagttcgtacgggaatgaaatttggtatgtaggaagacagtaaaattaaactaactctgtgttgtatggcaacagtatgaacgtcttgtaatgctgcgccttcaggagatggacgagattgtcctctgtttcttgtggatattggtcgagcattgcgacgtttactttccgagggttgatgaatccagtatcgaaaaccctccgccgtcgggccctttgaatctccattctacaacaataaaagggagtatattattttctatggtctacttatatacaaggacctaattaattaaaggagacgtatagtaagaaatctaactgaacgatatacttacaaaatccagcaactcataatagagacgtcgagggcgtccagctggtatagttcgtagattcccctgaaattgatccagagaatgtcatctccttgcaagaagtccgtgtccctgatcctcactccgatcatctctctaccggtggcgctcatctccatgtacagctgatggaacttgtacatttgtgtgggtagggactgcagcagctcaggcttgacaagcggtttaccgagttcgtacatgtatttcacttccgccttttcgattggtgcgactcctagcaattgatccgtagttagaccggtgtcagtaataaattgttctatcgtcatttctttaccggtcaccaacggctcgatctcctggtttggttgctctccaagctgagggactggtttggactttccagaagatgctttcttcagcgttcgctcatagtccgatagcttgatggcctccttgacagatgcagacatacccctgaagaagttcctgacactggggtctataggaatcttcttttctagacttcgaggcttgaattgtctcttgacttctgatgcaacgtaagcgtcaagctcctcttgcgtgcaatcgtaccccgggtccttgttcttggcggcgtcaactttcgccttctttgttgcccttgtgtgggcaagcggtggagctgggggggcccttgactttgaaggtgccggaagaggagcttgcgggggagtaggtgtaggagcacgaggaggagtcggtgcaggatcctgaggaggagtcgatgctggagcctgcggtggagacggtgctggcggagcatgaggaggagacggtgcaggatcctgaggaggagatggcggagccggaggagatggtgcacgagacgccgcttgtcgcccagggaggatgatgtaccgcctgcgccatagaataatggcatggcatgtgtctcgtagatgcgtctcaccgtctcctgcagggtaatccagctcgaggtcctcgtacgcgccttcgaccaactcaacttcgaccttggagtatcctgctggaatcggcctgcagtggtaagtacctgaagggtccgttgggatggccatgcccgacgccaccttcatgttgtgagagattatttattagtaatcaacatatataagcagcaactagcggaatggctaaatcttacctttattgataagttcttgaaaggaatatgcagctcacatggtgtccgctgagtgatgtcatcaacgggacaggtcgattcgtcctgtgtttgcatggcgtccatgctctgtgatcctacctgccccgttgaggcgcagctgctacggtttcctgacgggctcaccattgcaggaggaatggtcggctggggatcatgggaccgatgtgcggccatgcgttcatcaaccttccttgccacctcctcttgcatgttgagttcttagctcgatacccggaactctaggtctgcaatcttcgcctcggtatctctcttgctcctcatccgactcctgtacgtgtggatgtcctccttgaaaccaatcttccaaggaatcacccctttccctcgagttcgtcctggatgctctggagtctgcagggcgagtgtcagctcgtccctatctctgtctggtcggaacgtgccctgagaggaggcttccactgcatctgttagtcgtcgcgcagcctcttgtatctgatagccgaagaccagtgagccatcagctgggttgagcgttccaccgtgagcatagtaccagaacttcgatcgttccggccaattggctgttgccggttcgatacccctctcaatcaagctagcctccatctgctcccacttcggcatcgcgacgctatagcctcctgaccccaagtggtgatggtacttcttcttggcggcattttctttgtttctttccatcatcgcctgcccttgttcacctgtcttatatgcaacgaactcgtcccagtgatcccttagctttgggaatgtgtcgaagttcggtgtctgccccttcagtatatacttctggtacagatctcccttgaagctctgaaactgttctgccattttcttcagagtccaccttttcactttgtcctctgtacccgcaggaagggtgaatgtctcgagcattgtggtccacagcatctctttctccgaatctgggacaaagctctcatgatctccgcgtgcccttgttcttcgccagtacaccgtactgataggcacgttatcccgcacaacccaaccgctgtgacgtacatagttcttggcggcttcggccggggcactaggacgtccatcttcttccacttccgttatgatgtgccgaccctcaagcttcttcgctgcacctcgttgcccgcgtgccctcttctgtccaacggagggttgactaccactagcctcctcctcctggttcccctccacatccctttccacgtgcccctgctggttcccctccgcatccctctccacgttcccttcctcgttcaagtactggtttggatcctcgttcccctcttcttcattccagtactggctgcttccctccgcgattgtatcgtacaatatctgttcctcatcgcggtcagccatctgttgagacaagaaacatctgctaagtcacgagacatttatgttttaacaatctaagtcatgtatgctaagtgtaaatgtcgtacattagaaccctacacaaccttacgtgctaagtctaattacaaatcgtgatataagctaagtctaggtgacgtatattatacaaccctagctagtaaataattatatactaagtctaattacaaataaaataagcttatattaaaactcaaataatattacatgctaagactaaaatagtcatgtatatgctaagtgtttcgtgcgtatatgctaagtctaattaagactacaatagtcaattgctacttgtcgcaccaattccgtagtcaataattacataccaagtctaattacaaataaagtaatattatattaaaactcaaataatattacatgctaagactaaaatagtaatgtatgctaagtgtttcgtgcgtatatgctaagtctaattaagactacaatagtcaattgctaggagtcgcaccaattccgtagtcaataatgtcatactaagtctaatttgcaataaaataatcttatattaaaactcaaataatattagaacactacacaatcttatatgataagtctaattacaggtctaataatcttaattaattgcattacaaatataacaatcatttatattattacgtcacttgcctgctccaattccttctagggctagctcttccactcaggcttgacggacgactccgacaacacgtcttttctgcaagatacaaaaaaatgtattaggataaatgcgaagtaacatatatatatatatatatatatatatatatatatatatattgcatttcacgttaacgatcgtcctcgttcgttcgctcgttcacgttccctagctcgttcacgttcgttcgctcgttctcattcacgttcgttcgcttgttctcattcacgttcgttccctcgttctcgcttgtcttcgttcgatcgttctcgttctcgctctcgttcgtttgatcgttctcgttctcgttcacgttgtcgcggcaacgtacgttgacgtgttcgttctcgctctcgttcgttcgatcgttctcgttctcgttcgttaatggcggtgtggcggcatcggggcggcggttggcgcggcggcgtggcgacggcggcggcggcgtggcgttgtggggccgtggcggcggcggcgtggcgtggcagcggtggcgtggcgtggcgtggcggcggcggcgtggcgtggcggcggcggcattgcgcgcgcggcggcgcaggcggcggcggcgtggcgacggcggcggcggcgtggcgttggcatgcggcggcggcgttgcgcggcgtcgaaggcggcggcgtggcgcgtcgtcgtcatggcgcggcgtctcgtggcgggcggcgcgacggagagagatcgagatcggatagatcgagatgcatgaagggagatctggcggcggcggctctcaccccagagatgcggcggcagcggaggaggcggaggcggcggcgaggacgacgagctcgagacgacggcgagatacggcggcgtcggcgcggggatttgccctaggcagtggcggcgaaggagagaggccgagagagatcgatcggccgaaaacgtttaagtgttggtgaagaagacgagggcgcaccgggaatatatatacccctggatctttactcccggttgttctcaacaaccgggactaaagatactcccggttgttctcaacaaccgggactaaagatatctttagtcccggttgttgagaacaaccgggaggagaacaaccgggactaaagatatctttagtcccgattgttctcaacaaccgggagtaaatatcttttcccgctatttcgaaattctttttaaacccggttagggttaagaaccgggactaaagattatagcactgcatatgattttcgcttacatatgtgtttataaaatagaagttaatgcattaacattatttaaagtacaaagattaatgacaattacttcgaaaaattatttttggctgtaataaattaagtggataaatcgtaataagcaaatataattaataaaaattccaataatcatatatacttagcatatatatgaatgatattattatattggtaaaaactctaattaagatatgtatgtacatactgcatgatttaaaattaataaaaattgtaatcatcatatgtacttagcgtaggaattatattaaattaaatgctaaaaactctaattaacatatgtaaatgccacatgcatgattttaaccttttaaaaattcgaatagtcatatataagtagcatgtgaaagatagtaaattaaattgtgaaaaactctaatatatgaatgatagttttaaaaatatattaaatttaatacttttaaaaattctccagtcaattataattagcatatgaatgatagtaaattaaatgttaaaaactctaattaacatatgaaattgccacttgcgtgatttaaaacttttaaaaatcctctagtcaattataattagcatatgaatgctagtaaattaaatgttaaaaactctaattaacatacatatgaaattgccacctgtgtgatttaaaacttttaaaaattgtaagtatcacatataactagcatatacatgatttaaacttgttgaaacctctaataatcgtgcgtaattaacatatgccatacatcaattgatttatatggataatcaatacatccaaaatagtttacatcgtgtacacaataattacggcacgtactttctcctcactattgttccctccttgtgatcgctgtgtgagtaaggggtgtcttcatttgataggaggatgctagggtcaatcgtcaccgtgaaagggggttgcccatccaactgatcgtaatcctcgtcagtcttgtcctcaactccgacgatttttcttttgcctgggagaaccacttgacgcttaggctcatcaggccctctgcccttctttcctttgctagacatgtccttcacgaaaaagacttgcgttacatcattggcaaggacaaaaggttcgtccgagtatccaaccttgttaaggtcaacagttgtcatcccactgtcatcaatcattacgcctccaccagtcaacctaacccattggcaccggaacagaggaaccttgagaggaccatagtcaagttcccatatgtcctcgatggcaccgtaatacgtggcagttgttccatcgtgtcccatggcatcgacacgaacagcgctgttttggttcgtgctcttcatgtcttgggctctcgtgtagaatgtgtacccattgatctcatatccctggaatgtcgcgatcgacccagacggtcccctcgccaggaaggcaagttgttggttgatcgactcgttacccatgagatgttgtcgtagccacgcggggaaagtatcaatgtgatgctgtgtaatccatgcatcggacttaccgatgttcctggcgcgaactagagccaagtgctcctcgatgtaaggagctaccaatgaagagtgttgcagaacagtgaaatgggctttacggaataaattgttgtctaccgtcgttattgctttccttccgagagttccctttccccgtagtctcccttcatggcgtgattcaggtaccccgattgggcgaaggtcttcgataaattctacgcaaaattcgatgacctcctcggttccataacccttggcgatgcttgcctctggacgatcacggttacgaacatacttcttcagaacgcccatgtacctctcgaaaggaaacatgttgtgtaggtacataggcccgagaatacggatctctttcacaaggtgacaaagcagatgcgtcattatattgaaaaatgaaggtggaaatatcaactcaaaactgacgagacattgcaccacttcattctgaagggcttctaatctatccggatcgatgaccttctgcgaaattgcgttcatgaatgcacatatctttgttattgttgcccggacattgtctggaaggataccccttattacaactggtagcagttgtgtcatcaacacgtgacagtcatgagactttaggtttgtgaacttcttctccttcgtgcttattattcgcttgatattcgtggagtatccagacggtacctttatgctctccaagcattcaaacatactttccttctctgccttgctaagagtgtagctggctggactcaagtaatggcttcctttctcctttggttccgggtgaaggtcgccgcgttgttccatatgcttcagatcattacgtgcttccagtgtatctttcgactttccgtatacacctaggaagccaagaaggtttacgcaaaggttcttagtgaggtgcatcacgtcgattgcgtggcgtacgtccaagaattcccaatatggtaactcccaaaatatagagttctttttccacatcgccgcgtgaccatcttcgctctctatatgctggcttccaggcccctttccgaacactactttaagatctttaaccatagcaaacactgttttcccgctgcgatgtttaggcttcgtacggtggtcggccttatgttcgaagtgcttgcctttcttccgtaccgggtggtttgctgcaaggaatcgacgatgacccatgtatacaaccttcctacagtgcttaagatacgtactttctgtttcatccatacagtgagtgcaagccttgtaccccttgttggactgtccggataggttgctaagtgcaggccaatcgttgatggttacgaacagcagcgctcgtaggttaaactcctcctgtttgtcctcgtcccacacggggacaccttccttcttccacaactgtttaagatcttcgaccagtggtcttaggtacacgtcgatgtcgttaccaggttgcttggggccttgaataataatcggcatcattatgtacttcctcttcatgcatagccaggggggaggttgtagatacacatcgtaacgggccaagtgctatggccgctgctcatctctccaaaaggattcatgccatccgtactcaaaccaaaccgtatgtttcgtgcgtcctttccaaattctttaaattttctgtcgatgtttcgccactgcgaaccatcggcggggtgtctcagcatcccgtcctgttgacgctcttcagcgtgccatcgcaacattctagcattccccttgttcctgaacaaacgccttagccgtggtattatagggaaataccacatcaccttagcaggaattctcttctttgttagctgcccgtcaacttctcctggatcgtcccgtctaatcttgtatcgtagtgctttgcaaacagggcatgcttctaggttctcatactcctcaccgcgatataggatacaatcgttcggacatgcgtgaatcttatgaacttccagtcctaacgggcagactatcttcttagcctcgtacgttgtctcgggcaatttgtttccccccggaagaatgttcttgacgagtttcaataaatcgccaaatgccttgtcactaatcccatattttgccttccattgcaacaactccagagtggtatccaactttttgtgcccctgctcgcaacctgggtacaacgaagttctgtggtcctccaacatcttgtccaatttatgggcctccttttcactttcgcagtcctccctggcgtcctgcaacatctgaccaagatcatccgcaacgtcgttaccatcagcagctatttcctcctcgcccgtttgatttccttcaaatccaacatactgagcaaagtccggaatattgtcgtcttccacttcatcttcttccatttcaacaccttgctctccgtgggatgtccaacaattatagcttggcatgaaccccgactcaaacaagtggaaatgaatagtcctggatgcagaatactccttctgattcttacacttattgcatggacaacaaataaaacccctttgcctgttagcttcggccactctcaaaaaatagtgcacgccgtcaataaactctttggaccgccggtcagcgtacatccattgccgatccatctacatgagtcaaaaaaaccgcacacaaataattattcttacaataatgacagtcatacaataattataagatatctttattcatacaaaaatcataaaatattacaccaaataattcttaaaaactatttgtaaagttttaaactaattttaatgtgttttacttcttttaattttcattttagtttgttttctattatttaagattaactttcactagagttttccttctcaactattttataaaaccttgtttagcaaatgaactaaatttctatatattctttcttccccacacacattttctctctcatcaacttacaactaaattttggagacaaaaaaaagtgtgcaaaacataggtgcaaatgtagtataacaaaaaaaaacattggaggatgaagttgcaaaccttttaggcacctccgatttgtttgtaatcaccaaaataaattcaatagaaattttggcatgacctcccctcttttttgaagtaattttgaagcttgctcgggcagctggaggaggaagaagacatatatataggggtgggactttagtcccggttggtagcaccaaccggggctaaagatcaccgggatctttaagttaagatctttagtcccggttggtgttaccaaccgggactaaagatcccgggggggcctgacaggtcctgacagcattcgaaccgggactaaagatgatctttagtcccggttggtaacacaaaccgggactaaagatcaaatatgcccgttacccttttgaaccgggactaaagatcatctttagccccggtttttattgcatccgggactattgtggaaatcggccgaccgacgaaagatggtttctccaccagtgtatctggggcgatacaccgcgctactggcgctggatccctctcgccgactcctcaaggtaatgctgttccttccctactccattcatcccatttcaaatgcatccattagttttcatatctaactttaattgtttgataacataaaatattttatcatctaataactataaaaatatttcaaataagacaaacgtcaaagttggacacggaacctcatagccacgcttaaaatagaacggagggaacatgcagtgtagttgtgttgtccagtgactatatgtacatgagaacatgtttaatagtatagtcaattaatagctacaaatcatttattgttaatctaataatcaatccatataatagttacattacaattttatactacaccattaatatctgatcttaccttttatacccatatagtccgtgctatagtttggctataaatctgtagcctatttctcttttctctttattttttttcacatgtttatagctggtttatagtttgtttaacaatgacctttaattggcacatatatgatgctctgcaactagtacgtgatggtctatgctggatggcgatgctactactactctgcgctgcggcacatatttgttgatttctctctttgttactacgtgtttaaaccctttctttacaacagattcgaagaaggtgctgaactcatagatgtttgctggatggaaatccgttgcaacatagatagcaaaatgctctccccaaactcaacttatgctgcgttcatggtgttcaagatagctgaaggtttctatgggctggataccccgctacaggagggaacggtgagcctcggagggagggaatcaagacgcgaggttgccttcacttcgatcgatccgcgtccgcctcaagggagtgcagcgtaccctcagaaaagagctgatggctggatggaggtggagttgggcgagttcttcaatgagaatggtgaagatggagaggtgggcatcagcctgatgagtaaaggacccaattggaagaggggtctcattgtgctgggcattgagattaggctgaaagaacatggcagatgagctttttacgatcaacgagcgtcttggatgacggattaagagctttttacgatcaacgagagcgtcttggacgacggattaattgcggctacaaagtgttgtttttttgctgtgtcctgattccgtatgttttaattagcgtgtggttgttcatcggttgttccactacatgtaactgcactgcattcatcaaacgttgaaaattatttattccaaattaactgggcgtttgagcaatcgctttactactttccatttttttccccaagtagtagtatgttgcagcagtgtactagtgtacatttggagtacactggtatactatattgtaataagttcactttagacctctcagtttatcatcgggtttaaaatttgtccatgaatcgcaataccatgtatagtccgtcctgaacttgttcaaccgtgttaactttcgtccaagacagaatggctcctgtttttgtctgacgtgacgcttcgactttggtcaactatcctgagtcagtgtgggatatacacgggccccaatgtcagtagccaactctcttcccctcatctactcttccctagctagaaggcagcaggcgcagaacgacggaaggaagggctagagggaggaggtcatgtcaggtggcaggaggcagaccatgggctgagtggataggggcggcgctgccattctggggttggcaagaaaaagggcagccgtggcggtggatggatggatttgtggcgggaggaggtggagatgtgggcggtggaggcggagttcgtgtggtcggggtcgtacagagaggaggacaacaagccgaaggactgcgcgaggaggggcttcattgctgactttggtgacttcttttgctacatccgcgccctcttcggtgacgccgcatccatcgcacttcacacctcctcctctactttctcttctcaaccctaccggtgtcgactggttgaggagccactcatggctagaccacatcctcgccctcgaggataaccacgtcgctgctggatttggggcgtcgacggcctcggcggaatccccatccctcctcctcctttccctcctccgtcgatgctaacgccctcctccacgtcgttggctcgtcgctagtcgctactgtgcaccagtaaacgtgggttgcggtatggaatggccaaggtagcttctccccgtcagtagccatcctcctcaccgtccactgtcgtcctcctcagcacctgctgctagttttctcctcaccatcgtccgccatcctcctcaccgccctaaaccgtgagatgggaagagagagagagagagaatgccataatggtcattgacatgtagagcctcgtgggtccaatgctgactcaacgtcattgcctccagtcaagtagctacatcggacaaaaccaatcgctatactactctaggacatatggtaatttggttttgtaagttgagagacaatttatatctggtattgcggttcaaagacgagtttaaactcgacgaaaacttgagggacctaaagtaaacttgtgcctactatatttttgtggaataagttcactttgactccctaacctagcaaccgaatctgattcgtatccttgaactgcaatatcaaatatctcgatcaccaactattaaaatcggtgcaattgactctcttggcggttttggagggcgtttcgctactgtggcagtgttgacctagtctggttgatgtggcgcttaggtaacattagaattaaaaacatatatgtgagccccattcatcattcacaaaaaaaaaaatatggtgcccacatgtcatcccctctgtctttcttttttctccctctctctcctatctcttcctctccacttcggagcgggatctagagcagcggtggtggcggaggggcgagggccagagcagtggcaaccagcttcgtcgccgaccctccagctcccgaccgccgctgccgctccagctcccgcccttttactaccgtcgctgctccggccccccaagccgcgcccccgtgtcgtcccactgtgccgttgtggtgaagctagccggggacaaagggccgaagccattcgaatgaggaagaggaaggcggtggttcgggcaggcgaggtcggactcaaggacggaagcgaggcacgatgattcagaatcagagaccgagacctcagcggcgcgcggcctcggaggcggcggggagagcaggagtttgggtttaggcctggtttagttcccaatttttttttccaaaaaacatcacatcgaatctttggacacatgcatggagtattaaatataaataaaaaaattaattacacagtttgcatggaaatcgcgagacgaatcttttgagcctaattagtcaatgattagccacaagtgctacactacccacatgtgctaatgacgggttaattaggctcaaaagattcgtctcgcggtttccaggcgagttatgaaattagttttttcattcatatccgaaaaccccttctgatatccggtcaaacatccgatgtgacatccaaaaattttcttttcacaggctacacagggtgttaggctatgttcggattccacggatgagagctaatccctcctacatgaaaaacggagcggtccattaccgcgtgattaattaagtattagctaattttattttttcaaaaatggattaatttaattttttaagcaactttcgtatagaaacgttttaaaaaaatatattgtttagtagtttgaaaaaccgtgtggtaaaggagggagaaggatgtgaacatactcctaccgtttagtcgggtttccagactccagatatattatcatataacatgtgggcgccacgtgaaggaaaagggttggagattctcgtcagtcctgaaaaagaggtaggagtacgtacgtaagccttcgtggttaagtttcctgcgtcgtataagaaatgctccaagctaagctctcaatcaactacactcgtcagtcgccaccgatatgaatttcttgtgctttttccccttcacaaagaagccggattcgagcaagggggcggaggcatcgccatcgatggaagagggggaggcctgcgacgactgcgagtgcgagatcgcgcggttgccggaggagctcctctccgccgcgatctccctcaccgcgccgcgggacgccttccgcgccgccgccgtctcccgggccttccgcgccgccgccgactccgacgccgtctgggctagcttcctgccgcgtgatctccccgatctcgccgacggcgagctctcccccgcgccgccttccaagaaggacctcttcctccgcctctccgccggccactaccacctcctgccagacaggctcaaggtaattgatttaataagctgcttaatttgtcttcaaaactgcaccgctctcgattcgccggctaataattatactacttccgtttccgtttcatatcatcagttgcttgattttttttaattaaacttctttatatttaactaaatttatataaaacatactaacatttttaatacaacataaaaatatatattcgatgttaaatttaatgaaactaatttgttattgtaaatattattatctttttataaatttactcaaacatgaagaacttgaattaagagaaaaatcaaacggatcgtagagtatgtagtacgaggtttgttttttttcttaaacgaaggaagtactccctccgtttcgaaatgtttggcgccgttgactttttatcacatgtttgaccgctcgtcttattcaaaaaatttaagtaattattaattcttttcctatcatttgatttattgttaaatatatttttatgtaggtatataattttacatatttcataaaagttttttaataagacgaatgatcaaacatgtgctaaaaagtcaacggtgtcaaatatttcgaaacggagggagtataatactgtatggtgttttggcgcagggcatgtgattggacagggagaccggggccaagtgctatgtgctctcggctagagcgctggtcattatctggacctgtacaccaagatactggcgctggatccctctcaccgactccaggtccaacgaattcttgtgttgtgttgtggccaatgcctttgatgtgatgtgatgtaactttaccttccatcaacctccgattgaagattgcatatgcacacaacagtacgcatttaattagttcgcagcacttaaaaaaaagagaacttttacggtataatatactaccagtatatactaaaataaaaaaaatatacatatattcctaaatagtattacacttgtttataaattaaagtttgttagcttttttttctatggctaaaaatataattaattaaaagtttaaagacttcacgtataggtgtgtgatactatttaaagtagatgtgtaacttttttaaaaaaattcaataacattcgttagttgatgtgtacatagtgtgcatcaaaaagtttttatgtgtatgggataccttcccgcttcatacttcatattgtttgcaacttgcaagtgcaatggcacttttatacgaattttagttctactagtaccagtatttgtttgctagttaattatcctctgcaaggcatatttaattaatttgttactacaataatcccttgttcacgacagattcacagaagctgctgagctcttgagtgtatgctggttggaaatccttggcaatatagacagcaggatgctctccccgaactcaacttatgctgcagttttggtgttcaagatagctgaggagttctaccagctggatactatagatgcaacagtcaacctcggaggctcgaaatcaagtcgcgaggttgctctcactcgatcccgtcgtcgtcctgaagaagagatcagtgcagtactgttccctcggacaagagctgacggctggatggaggtggagctaggcgagttcttcaacgaggaaggtgaagatggaaacgtgaacatcagaatctttggtaaaggacccaattggaagaaaggtcttattgtgctgggcattgagattagaattaagaaatctggcagatgatcgagcttctaggatcaaagatgcgtcttgggagtactgaaatgtataagatttccgatgcctgaagctttggtgttttagtggcatttgcttttgctgctgctagtgatgggcaaaactagagggtgtttcctcttcttgtgggtaatctgacggacctttttctcaattgctggggacaaactgaacttctgtagccgacatcttggttcagtgctggacgattgtctacatctggtttggaagatgcaactagagacagctatatattgccattttaaatgttgagtaaattgcattaacggtctctacacttattatgctatgtcatttatgtccctataaactttcaacatttatgctgattcagaaccgaaacttactaaaatatcatcccaatacaacattgtcacaagacattagggatcctacgtgatactgacgacgtgattaccacctcccctcttcattaatttcttacgccaactgccagtgggtctcggcctcctctgaccttctctctccgttgtcaacatcctctcctaccctcctctctcggtgccaggaaaccatgttgtcctctctagtcggcatcaagtgatgatggagttgcctcaacatgactctgtgcggcgatgggccggcagatcccggggtgtggatgcgctgccctagatctagccattggctcgccactatctcatacagacggtggacatgaaattgatgagtaaagaacctaattggaagagaggcattgttatgcagcgcattgaaattaggtttaagaaatctggccgatgctccttctaggatcaacgagcgtcttggagtaaacgagttgtgatcatttgcttttgttgcaaatgacgtgcaaaactacaaagaaaatttgatgaaaagtcactctcaatcgtgggcttcaataaaatgttagtattttctagtactatattttgctccttaaaatatattgccacctgctgtatttttcgccatcgtcagagttttaagcctattttattgttttttttcactcctttcctttacgcatggaaagacaaaaataccccctcgtatatttggataagaccaaaatacgatcgacatgttgcggctagaggtgtcagaagtaccaattccgtaaatatttcgattagtatgtgattgttttttttaatataatggaataaaaattagtatgtgattgttcatttgtcgttccattacatgtaacttcacttcatttatcaaagtttaaaattatttattccgaattataactggtttattgagcaagcgctttattattctcgaccttttttttccaagtatatgtatgtggcagtgtgtactccgcagtttatgactgggccaagcaaggcccagacacgtaaagtaactgggccatttttctccggacaagcaggacaccggcccacgcgtattctcctggtcccacacgtcagtccccctgaccaacgcttcctcgaccaactccctcccgtaaatccaatccaaaattcgaattcccaccacgaaaccacgcatcgatcgaggtcgaggagtcgtcatccatggcgatggaggaggaggaggccgcagcgtgcgagatcgcgcgcctgccggaggagctcctcgtcgaggtgctctccctcaccggcccacgggacgcgtcccgcgccgccgccgactccgacgccgtctggtcccgcttccttccccgcggcctcccgcgcctcgccagacgcgagctcccccgctcgccgccgccgccgccgtccaggaaggcgcacttcctccgcctctccgctggaccccttctcctcccacgcaaactcatggtgcgttcctgcaatgtcccgcgcgcgcccccccccggaaatgtgctcctcacttttcttctccgattgcgtatgcgtagtgccgatctgctggctcatcagatgattgtgctgcgtgcagagcatgtggttggacagggagaagggcgccaagtgctacatgctctcggccagggcgctgcaaatttcgtggggcgattcgccgcagtactggagctggatccctctcgccgattcaaggttcgtgctcaaccacatttctctgcctccttttttcacttatgttgctattttgtcatgtactctgttcagtagaattggatggatggctcgtcaaattgtgatcaatcgctaattgttgcagcttgcgtgctttatttttttagctgaaagctttgtcatactatattacagaacaagcataaacaaatttcctagcagctttggttgtatcaccagatcgaatccaatggtcaagtcctttttatttggaaatcagagtttatacacatgtgcacccccccccccccccctttacttgcaacttgagcacgtaggatgcataaattaaacatatagatcgatgtcacttcacctaaataatgttgctcttgcggcgcgatattttagagaatatgcaggagaactgcatatcattctattgatgaagaagtgaggagggatcagtacatagaacacatccaagctacacatggaacataaatcagtttgttcatacaacaaattgagttcgataagctacatgtttcatgcctaaatgccattattatgctacactgaagcagttcatagaatcttgtttgatggcaagagttatggaatttgaagttggttctgtatggcttaattgtttgtattaactcatctcttactttgtcatgaataattatgcaaaaggttcaaagaaggtgctgagctcttatctgtttgctggttggaaatccgtggcaagttaccgggcaagaagctgtcacaaaacacaaattatgctgcataccttgtctacaagatagctgatagatcctatgggctggatttcccattccaggaggcatctgtcagcatcggaggaagcataacagcccgccaagttagtgtcgttcaatgaaggctcaagagaatagaaccacgtgcagttgttcttgcagaggatatagagaaccctcagaaaagggctgacggttggatggagctgaagctgggtgagttgtataatgaggaaggtgacgatggtgaggtgtgcatcagtttcatggagacaaaaggaggccactggaagagtggccttgttgtgcagggtattgagattagacctaagaaaagtccacccctgaactctcttgcttgctcccatgagaaaccctcctgctcaacattgacaacgttgcaatcgtgcatggaggagattttcctctcagacgggctcacagtacggccctagctccccaaatgaaaaatgcttctttgcatgccttttttgtatgtttcttgatcgatcggtctaataaggtgatgtgtgcttctgtacacagagtatgtggttggacagggagactggttttaagtgctacatgctgtcggccagggcgctgcagattgtgaacttaacgcatagctggcgctggatctctctcaccggcagctccaggttgttgaactatatgccccttcctttcctctgcgaagttttccatttcgcaaaatttgcaaagcatttatactcttgtgctttctgtggtacatgaaattgccatattgtaactttggtggagtatgtgttgtgatgatagatgaaattgctttcagaatagaaatgtgaaatcacagttgttgttgttttcaaaaatatgcataagaacttgttaagagaaattacacgtgatatttccgtacatacacaaactttattgaagagattctgattatatcgaaaggctaagaccaaacttcaagttgtttttgtttggaaagtgatattctgctatacagtagctgctcctctgatggctcctaggattttaattgagcgtttctttatttctttttttctgaagagcaaagaccaactctgattttgtaaacagagtaacaagaagtaccgaaaaaatagctttcttgtatcttgttgatcccaatggagttcttgaactatatatctcttgtcaatattgaaaaaagagttatatctgttgctagtcttaaaaataaaaatatatgtatatctcttgcccccacggtatggagctaaggcaaaactgtgtacaaaagcttggtgactcgaaagttccatggaaatttgttcctgacttcccgtgtcctatttttttcctacttgtatgtattcaattctaatgatttgttacaacttacaaatagtattaaccacgtgtttactccaggttctcagaagttgttgagttcttaaaaggataccgtgtggaggtctgcggcaagataccttgcaagatgctctccggaaactcaaattatgctgcttacattgtgttcgtggtagctgaagattcatgtgggttggcttctgtgtgggttgcaaccgtcggcgtcgggggacgccaatccactcgccaagtttgcttggacagctccaaccgcaatgactactactacgaaggcgagattgaggtgcctcaggatgggagtgtgattctccctcaggaaagggctgatggttggatggagctggagctgggtgagttctacaaccaagagggtaacaaccagggtgaggtatgcttcagcctcgtgaagcccaaggcaggcagatggctgtccaatggaggccttgttattcagggcatcgagattaggcctaagatatcttgacggagtagcaattttgaactatgtccgagtaataaccaagtgaaaaagaacagagatgtgtgatcagatactgccacttgcttgatttgtcaagtgaggagtgacttctgcttcgaattttctactactagtctacggctctacacatatactacaacatgttggactgcaaaaccatgggcggaagtggaactcgaccgaccttccggcatgctcaccggtggtattattctcacattccccagctgtattttttcttgtctccttgtcatttgccgaattgccaatggggccgtcgtgctgcgagatcgcgcgcctgccggtggagctcctctccgcggtgatctcccgcgcggcgccgcgcccgcgcgacgcctgccgcgcctccgccgtctccccggccttccgcgccgccgccgactccgacgacgtctggtcccgcttcctgccgcgggatgtccctgacctcgccgacggtgagctctccccgccgccgccttccaacaaggcgctcttcctccgcctctccggctccgatggaaatgtccccctcctgccagacaggctcagggtgcgtactaaactaattactgattacttaagactaagagcactgcttccttgatgatctcttctcgtgttcaaaactgctgctctctcattcacagggcatctggttcgacagggagaccggggccaagtgctatgtactctcggccagaacgttggtaattaagtgcagcgagacgtcggattaccggcgctggatccccctcgccgactcgaggtccgtttcttaggatcacacgactggttatcgtgttgtccagtgcctttacgttcatcataattctccaatcggcaattgcataattgataattcgatggttcaagtgatggttactttcgatttctcatgatttccttacaagtttcaaacccctttgttcacgacaggttcgcagaagccgttgaattcatggatgctcctccccggatggaaatccgtagcaagatagacagcatggtgctgaccccaaactcgacttacgctgcgttcatggtgttcaagatagccgatgggttgtacgagctggacacttcaccacacgatgcgacggtcagcatcggagagaatgaatcgagacgcgaggttgccttcacaggaaggtaccctgagagaagagctgacggctggatggaggtggagctgggtgagttcttcaacgaggatggtgaggatggagcggtgtacatgagattgatgagtgaaggacctaaccggatgagaggtcttattgtgctgggaatcgagattaggatgaagagatctggcagatgagcttctaggatcaacaagcgtcttggagtacttaaataaggtcatgtttgtttcagtttaggattattataatttagattattaagccagattactataagctgaattataataagttaacataaaataagctgtgagttatttgtttatctggattattggaggcacggattattgggtttgaaaggctaaagtctataatgcccttggcctttttggatgcctaaacggcggcggcgcggttcggggaagaagacgaggtgccttagtggggaacgcggtggtgcggtcgagggtggaggaggttgctcgcgagacggggcaccgcagtggggaacgcggcggcgcggcagggggtggaggaggttgctcacacacgcatgagtgcatgaccaggggaggaggcgacgccgcagattgggaaaggcggcgcgaccgggagattaggaggccggatgcgcgcaagactgggagaggaggagccgagttcgcgcgctcgccaagagagaggagaggcctatctgtttgttcggttgatggtatgggtgggtaatttttatcaagtatccaggggtagtgggtctttagccacccaataatctgaaaaaagctcctttagaggagcttattagattatgataatctggcttacagattataataatctatcatgctaatctatctgtttgtttcagcttactactaataatctagattataataatcctaagctgaatcaaatagggcctaagatttgtgatgatgcgtatttttatagcatttgcttttgctaatattgatgctcttgtggataaactgaaatgtctgtacaatgaggaatattgggttatgctagctaggctttgtttaaataccacactgtaaaaaagattcgataaaatatcactctcaaccagcgtttttatgttgaaatactatttcggacattgccctttgggctcctcttcttccttcctccggaatgtacactgtcaaaccaacaaaataacccgtgacctccttaaccgcatccttaagcatggtggtattgctgccctgggcaaccatgtagacaacatcgcgtggttgattggcggcttcaggccttgttcggttgggttgttcccggccgggatcggggcccaatccccatggatcaccccggcgaggaaaaaatcccggcccatgcgaaattgtgcgttcggttaagccctgccgtgaattttagcccggcccaccacggggtttccctcttctctaggcccgggaaaaaatcatctactcctggagcgtggaaaatttcctcgagtggaggcggcggcgcaacgaagacgtgacggagggggcagcgcgcggtgcgacccggaggcgacggcgacggcgacggcgacgacacggctctctcctccggccgccaccttgtctccagtgagcacgctgcctttccccttcttccctcctcttgcaaagctagggttagggttttcttctcttctccctttcctgtcgtcgccgccatctctcttctcgccgtgtagctttctggtgagtgagcgcttagcgattcgtcgtcctcctcctcgtatcctgctcgatctggtgagttcttgatttgggcgtggagctttttttcttggttgggtggggatgagttcttgatttgccgccgccaccgcaccgcccaactctggttcttgatttgagttcttgattcacggtggctttgaggcagcagatggtgagagcgagagctgtacggtggctatggaaacatgcttgccttgattagttttgcttagtgtgactgatgctgtgatgcttgcctgagcatgtcttgtaaaattgactatacaagtttttacagtgaagtactcagttcttggtgcttccggagtcccaacttgtggttgttggttatatttctgtttggaaattacaagggttgggtgtcctgattttgaggattgtagagctatggaggtactctgtaattagtttaacatttctgaattgtaaactaattctatcgtcattgtttcacaaacaaactagcaacaaattgctgcagtatatacagtaatgtatacttaaactgatttattttaaactaacaacagtagcttttagtctcattagactaacatatttgttttcctcaacatgatacttgtataaaacatgtttatcatagctattcaagcactaatatgtctagtgttaaatgagctgattgggtgattaattctgtacccatgttataatgtatttgatgatgagatccttctatttgattgaaaaacagcagctcctactttgatgctagctagcactagttctgggttttatgtaactctagttctagttctgaatttgagttgtcagtgatgtgtataagttgtgcttgttttgtagattgcacgtgcacccattagagttggagaagaccaacctcctccttcaattattgttgcactgtgcactctttaagaaaaaaagatccttattgttcttttcatttttcccatcaatttttaaatatgcttcataacttggacttcttaagattaattcccatagtttagtgattcttttgtgattatctttctagatcttttgttgctgtgctaagtgcaaaattgtaaataatttgtgctctatctatagtactactatggatatgagagcaagagaccgcgctagaaagaggagggaagaggaggacgatgatatgatgttgtttattttccctgcactacatttgttgagttctagtggagcaagggaaaagaagcgacgccatacatcaaagataacaggcgaggagcgtgttcgggagttgcttgaagggcatgtaaaaaattgccgggtagcattcaggatggagccggaaatatttatatctttggccaattaccttagaactgaaaagttggtcgatgatactaggattaaagttgaagagaagttggcattcttcttatacatgcttagtcacaatgcttcatttgaggatttgcaagagaaatttgggcacagtggggatagctttcatcgtcacgtaaagcatttcttcaactcagttgtcccttcgctctcgaagcggtttctgaagcctccaaatcctaatgaagttcattggaaaatagaaaaagatcctagattttatccctatttcaaggttcttacctaaacacttatatccttattaatatgttgttttacatttttagaaaatcatatgtggtttttttttgctgcagaattgccttggtgcaattgacggcacccatatacccatatctatatcatctgacaaagcagctccatttagaaataggaaaaatactcttagccaaaatgtgatgatagcttgtgattttgatctgaagattactttcatgtctactgggtgggaggggtcggctacagatgccagggttcttacctctgcagtaaacaaaggcttccaagtaccccctggaaagttctatttggttgatggtggatatgccaacaccaattctttccttgcaccatatcgtaaagtcaggtatcatctaaaggagtatggggcaggtcggcgtagacctcaaaactacaaagagttatttaaccatcgccatgcggtattgaggaatcatgttgaaaggactttgggggttgtaaaaaagcgcttctctattctcaaagttgcaactttccacaaaatcaagaaccaagtgaagataccagtggctgctgcagtgttccataatattattcgatcactgaatggggatgagcaatggttaaataaccaaccacataatatccatccaagcaattatgttgacctgccagatggtgatgaaggcaatgatcaaagcactaatcaagggaatcttttgagggacacgatagcacatcaaatgtggaatgactatcgacagcataggaattagtgggttgtaataagtagtatatttgattttttttttatgttttgtgagctgtaataactacgacatattacaaatattatgttataaatgaactatggtggttgcatgtgacatacatttgctacaatgcttttgttatgaatattgtgttatgcatcctttctcagttaatatgcttggaagaggttctccaaggttgaccatgcttttagcgaaagctgcacaaaagaagaactctccgaaaggtcgtcctacaaaaaagcatggaggttctccaataggtatgcaattatagaacatgtgaaattcatgtttgaaattattaaatgtagattatacatcaattcttatcttgtgtagaaaaaacaagagcctcttggaacccagccctagagaagattcttgttgagttattgcatgagcacaacactcctgagtataggggtcagaatggatggacttcagaagcttggaacaaaatcgtgaaggaattccatgagaaggacagatatgtctgcttaacaaagtcccaaatccaagaaaaggagaaagagctaaaaagagaatataggatgctgaaagaggctagaaaacaaagtggagcttcatggaataaccagagatgcatcattgaggctgagcctgctatatggaacaatataatcatcgtaagattatttctgaccattacttaattttgtagttaattacattatgcatctttttagtgttttccttttattgtgtagtcatttcctaaagccaagaagtttcgcaccaaatctttccctctatttgaggccttgggagaactttacgatggttagttctatcacaagctataatccttgttttcaatatcacaagttataatcatgctttcttgcttaccctttcttgtactcaattttcttgtgtaggacatactgcagaaggaacctacaatttcacctcaactgagccattgcaacatccaatcattactcaagttgagagtgatcaagatgatcttggtaacactgagattatatttccagattatgaggacaccttgacttatcaagtacaagatgatgcagatgcaactgaagatgataatgcaaatgctgaaaggcttaaagagatgccgcatagaagggttgttgctgtaccaagaaacaaagaagaaaaagaacccaagaggcaaaagaagagtgttggtgtagaaggacttatggaaaggtaccttgatatgaggaccaaacaaactgaagatgaggctgcacaattagcaagagaaaaggaggctcatttagcaagagaaaaggaggctcagttagcaagagaaaaggaggctcatttagcaagagaaaaggaggcttatttagcaagagaaaaggaaagtaatgatttttcaatcaagaggtgcatatctgttctgaattcgatggatgtgagaaaggcagaaaaggtcaaagcatataccgtcttcaagaatgcagagaacagagagatttttgtgagtgcttgtgatgaggatccagaatctgccttgagttggttaagaagtgagatggcttgaaaggtaccgcttctcttccatataaatcttttttggtctgctaggcgagtaagatgggcttcactctgtcctgtgtgactctctgttgttagttacatgcatgttgtttagggctataaaccaggatttacattatgggctactcaccttttttttattttcttgagctgatgagctcactcaagtctgaactgatactacttttagcatctgaaaaagctaaacttaagcagtatagcagtgcaattttatttactttgaagcatctgctttgctcctgataaaagaatgttttttaaggtaccgtgtggctctagttatgtacttcattattactatgttgtcaaggctgaattgttagatttttttgttagcttcctagttcctgaacttttaggtctcttttcatctttggttctatcagactgttagcattccatgtagtgcatcagccttagtttggatattagtgtggctctttgctttacttgtttgctcttatgtaatctgtactctgcatttgttcaatttgatatttggttgacaggaaagaacatatatggtgtatttctttttggaattgatccaatgttgctccattttttttcagagatgggaacactgcagctgggtgactgaagctcatggtggcattagtgctaagcttaaacacttgcattcaatttgtagtttagctcttagctggctacttctatttattctaaaaaaaacaactgaactgtaaccatttttattactttgtgacactttcatgtatgcatttgtgaacgtacggcatgcatgtgtgttttccctgtgctaaaacaatgttttttttactgcgtcctatggatttgatctgggagaatgcatattgtttcattgcttgcttgggaacgtacagctgctgctttatatttccctgtgctaaacgaaggcagggtttatatgacagggattagaaacgggcagggattcgaaccccacagggtttgagtgagataggagggattcactcaatccctccctggataggatcccttggggattaattcccaagcaaccgaacaaggcctcaaggagaacggtcaggtcggcatgttggggctagtgtgcctgtgcccggtatgtttatgtttagcagataaaatttgaattttttttatcttaaatttaaagttgattttggggttttttttattgaagtttattttttaagcctttgctactaaatcactaaaaacacgtgtataaaattttattcatagattattttttgtttgtaaatatatcgtttcgtttattccccgaagtcatgagtgcggtgtctgttagaggaaagaatattagaagaagacaaatccaaagaccattttgtttaggatagcatttctacgtggagtgtgataagacggttcgcggtggatggcagctgggagcaatgcatgattaactgtaaacttggggacgtttttgtaaaatgtttgctaacgtggcgctctaactctcaagcattcccatgacgtttagatagattaattaatatatacagcgtggtatttgtgcaaaatctatattcaatagtaacataatcgcaagattcccatgtaataatagaatagaacatatgacgttgtcatagttgaattggacgatcgcgctaatgatacacgacgacacgggagacgacacctgactgatggacacaccacaagcgccgggtcaacccgcggtggaacagttggacaccatcgagagagcaccgcaaggatgggagcatccgagtatgcatagagcaggtgcaatagctataagagcatagtatatcacactattagctctaaatcatctatagccaaagtaataactcatacaatagttgtttactatactattaatatctggccccacctatcatacacacattacgtcttggagtccgtactatctgtagcccactgctcttctctcccttcatttatctctttaaaatatgtttatagctggtttatagcctgctattgtacctgctctaagccagctataaccatatatcgagaagaaatataagaaagcgggctacagatttgtagccagctgctacacggactttaagacattattatatatgtatgagaggtgggatcggatattaatgatgtagtatatttttatagataactattttatgaatgtactatcagattacctaaagatgatttggaaccatcagttggctatactattaaacttgctcttagggtgtgtttagtacacgctaaaattggaagtttggttcaaattgaaatggtgtgacgaaaaaagttaaaagtttatgtgtgtaggaaagtttggatgtgatgaaaaaattggaagtttgaaggaaaagtttggaactaaactccgcgttagtatgacatgtaagccccacagtacagaaaacaaaagtaatcttccttttggtctgattctcctgaaacgcatcgctatccctatgaccctatccacccgcatgtgcttctgcttcgtagttaagcttttctagttttattttcaaccaccgcgcactcacacacactctccgacgatattttccttctctgttttttttttccttcgccatcaagccggattcgaggacggagggatcaatggaggaggagggggagggcctctgcgagatcgcgcggttgccggaggagctcctctccgccgcgatctcacgcgcctcgccgcgggacgcctgccacgccgccgccgtctccccggcgttccgcgccgccgccgactccgacgccgtctgggctagcttcctgccgcgcaatctccccgatctcgccgacggcgagctctcccccgcgccggcttccaagaaggagctcttcctccgcctctccgatggcccctacctcctatcagaccggctcatggtgcgttctattttatgaaaatccccaatccaacaaaatcggttgacggattaatcgaagcatggttgatctcagttctctcgattcatcggcgatctaatatttgtgtttttttttgggtgcagagtatgtggttggacagggagactggggccaagtgctacatgctctcggccagatcgttggtgattatctggggcgatacaccgcactactggcgctggattcctctcaccgactctaggtccgtttcctgaacttaaaccgtgctgatctttccaattcatgtggaaattttgatccaatgaggcaatgcctgtgcgttgagtgatggacttgcaatctcgttgcaacttgcaatggtattatccggtctgatgggagaatagattgcattatgtggtctgatgggagaatagactatactacataatagtatgatgaatcaactagaatatgtatttgtggtgaagtgtagttccgaatattattacccccagaacaagggcagattcttatgcaaattcgatgataacgaaagcggccaaagtagtaaagtgttctctctgagcatggattgaagtgtctttcttcatttacttttcaagagcaaagtagtaaagtgcatggtatttgcaacaatagattatagaatggcaggcactttacataattgacctgttgtgtgccttcattatagtcgtgcaaatggtatacgcggtagtactgatgaacggcttggttaataaacaaaaggaaaatgctatacacacaaccagcttatccgattcttggacaaccgtaatgtacgggagtgcaaaacgtcgatctccgtaggaccaacccgtactgctgcctcacgctgtcacgcactggtctgttccgccgttcagttgtacatcagtcaaacaaacaagtcgggtgtatagcagggttctgtacagaagttatgggattttggttctggtgctgaatgctcctctgcaacttaatgtttgttcatttctctttgttacaagttttaacccattgttcacaaatcacgacaggtttgcagaaggtgctgaactcatagatgtgtgctggttggaaatccgtggcaggatacacagcaagatgctctccccaaactcaacttatgccgcatacatggtgtttaagatagctgatgagttctatgggctggatgctccattccaggaggcatcagtcagcctgggaggtaggggatcaacaaaaattgtttgtgtccaaagctatgacagcgaagatgaggaggtgcctgagaattactggcctatgagtattggtccattgctgcgacgaagggccaggagaagagaccgtcgtctagttcttgatgaaggtgtaacggtccctcagaaaaggactgacgagtggatggagctggagatgggtgagttcatcaacgaggaaggtgaagatggagaggtgtgcttcagcctgatggagaccaagggaggcaattggaagagaggtcttattgtgcagggcattgagatcagacttaagaaatctggctgatgaacttctaagatcaaggcgcgtgtaattaaataagactcataatgcgccattttttttgtttgtggttttggcttttgttgccaatgctgtgcaaaactacaggtgtgtttcttttttcttgcgggcaaactgaactttctgccgagaagaaaataccatagtgcgatgcttgataatagcctacatttggtttgcaaaatataattaaaagaagcggttgccattttaaatcttgttcagttgaaaatccttgcggctgcggagtattttggttatatttatctgaacattaactaatttgtcagttcggtgcttggaggcttggagccactgcttctgtaacatcgcggaaaatctgtgtaaacttgcatatcctattctttctaccctggcgagacgatggtgtttcccagtccacgcattctcaaggttttttgacgcaagaacgaaaattttagtagtaaatccgtacagcctattcttgtccacttggaaagaaagcatattgtccatttggcttaccactcactccgtactttggtaacagaaaaatataaaataaatgataacggctgttaaaaaaaatcagagtcattgtgcatttggttaattgataacggctgttaaaaaaatgatataggccaagagaataactccgtactttggtaacagaaaaatataaaataaatgataacggctgttaaaaaaaatgatataggccaagagaaaaaagaaattggggtgagagaggctcgaactctcgacctcaggataactcaaatagctatgagacctacgcgctagccaactgcgccaccaccccttgtgttaggattggcaataacaagaaaataaaattgataataaaaaacacaaaaggatgaagggggctcaactgcatgacttcgtcgacagagtttaattgttgtcacctctctgaaagaccggaaagggacagacagagcttggttctttgattgttttaaaaggttcagttaaattctttaatgttatctgttgtcttccatgtgtaaagaaaggttactggcttacttccgttttatcggtgtatttcacatgtacagaaagttcacaagaactaaacagtatacgtggccttctttggctcttgacagttcgaaaatcgaaagctacttatccaaagatgtcgacttctgctaagctccatcttgctcgccacgcgcgtccacgttccacgtttgaaggcatttctgtcccgtccagattcatcgaatgcaagttcgcatctggaaacaaacacacggcacgaacatggcttttacaccacagaccgaatcactgaaagtctccttttgcttttctgaaatggaatctgctgcagtagaagctatcccgattaactgaacatgaaacaaagccaatctctggtagaacaaaccctgcattctccctgttgtaatcaacatgtacaagtgccaagataaaaactgagcacctaatttattttttttggtaataataagttctttacagtattccgtaatttggagtagctgttaagttccatctcgtcagcagctgcctgcagaattttaggagcactgcatccacagtggatccccgaattgtcacggctgatgtaagcatattatggtcagatgattctttttttataaaaagaacttagtcagatgatttaacttaacattttttaaaaattaactaactaattaatggtctattaggtaaagttttaactcctaaatttagcttcagaagttaggtttggagtaaagttgtgaagcagtccaaatccagttctacttctccagtttattttataaaagcgtctcattcaactgtactttgaaactgaaactgtttgactaagctttagtctaaaaaaaactaaatctcaagctggagttgtatcaaataagctctaagcacctgcgtgcgtgccaacgtggccgtgtaaaagccgcctcagatgctgccaggacatggcggcgtaggaactccaacgaccacgtatccacaaaccaaagcccccctttaaaatccgacacaagaaacagatccaaccaattcgctcgcttaagccgccggcaaatcaacccaaccccaaggtacggtgctcacttctctctcttctcctttcctttttttttggttgtttttagcggtggattttgggctccacgcgcgtcgcggggcggcaatcgcgtctcatcaagtgattcctcgcgctaaagttcatcggatttggattgcaagttgttgtcaatctcaggaggggctctgtttctctctgttgtgcgtgtgcgcgttagggtttttcgtgtggtgttgaggatccatggctaggaagatgctcaaggacgaggaggtggaggtggccgtcaccgacggcgggagctacgactacgacctgttcgtgatcggcgccgggagcggcggcgtccggggctctcgcacctccgcgtccttcggggctaaggtttgacttttctcctctcccccgctccccatttttgcgaggaaacgtgttggatttttattttttttcgtgtgatttgattcggtgtgtggcgcggttcaggttgcgatttgcgagctcccgttccatcccatcagctcggattggcaaggagggcatggtgggacgtaagcatctgccgattacttgtctgcgtttacatttctgtcgttgaatgcttgattatgatttaaaccaactctcctcatcccctgggtgagaatgtgagatgttgctgcatcctaaaacccgcatgctcattattgtacatgttgtgctaggtgtgtgatacgtggttgtgtgcctaaaaagatactggtgtatggttcatctttccgcggagaatttgaggtaactgatcttactaacttatggagccaactattacttgtttgaaaaacaagttggaagcattgtgtttaggttcaatgtgctgtggcttgctgaattatgttcctttactcaatttttgcaaaatttgctaagccttacagcctccatccttgatcaacagttcatcattctgcgtactgacttgaaatccaataacctatccatttgagagcttgttatcatctttttatacaaactatttcatttagcttgcttgcatctttgtgagtacatgtactgaagtgtcattctggggtgcttattggaattgctactgttgtatgattgcaggatgcaaagaattttgggtgggaaatcaatggggacattaacttcaactggaaaaggctgctggaaaataaggtcagagccgcaaccttggttgggagaacgttcctgcattattatttgctcgttataaatgcttacaacccaatattgtaaaaaccgttctctgcagactcaagaaattgttagactaaatggagtataccagaggattcttggcaattctggtgtgacaatgattgaaggggcaggcagtttggttgatgctcatacagttgaagtcacaaagccagatggttcaaagcaaagatatacagcaaagcacatattgatagcaactggtagccgagctcaacgtgtcaacattcctgggaaggtaacaaaattctctgccagcctttgcaaacttgtttcttatgtctggcaagtagttaatagcattgttacttgtttgacaacttctttatattccccaacttttgtgcctgaaacctttggattgacctcgtgatgctgatttccatgccatcttctgtatttgttgtgatactgttgcacatcaataattatttgtgatagccagtttgatatggctgaacttttagggttaatcccctttagatatttcttattacttgacccaaaatacaatactccctctattccataatataaggcacaactactttttaaagctgttccataatataaggcatacatgcatgcatgccattaactaacacatattctccactaaaatattattatttaaattctccactatcaagatctctaattttattgggtgcatgtattacatttattagattaatctaaactatgaggtgattgaaggtggttgtgccttatattttggaatggagggagtactaggctacctttatatactgaggtgcctctagataagggaaacggatacaaactattaacctgatactactaggactcttataacaaaactatgaaactctgataaggagcttattaggactttccaactgctgaagcacttgccaaatctgacttatctctattacgccgccgctgatatactataccataacgtccagccatgacacagttggtgtggatttgacattacaagacttcctttgagccagttcaagagggacaaagcattatctttaatccaacaaattatacttagccatatatatgtgctggttacatcactgattttcttttccctttagtttttttttaaatgtcctttggtgtattattttggctgacactgataagaacccgcttgcaggagttagctattacttcagatgaggccttaagtttggaggagctaccaaaacgtgctgtaatccttggtggcgggtatgtctacactctagggtgcatttatgtactatatattgttatgtcattccaactatctcagacttgcatttgttcatgtggtggctatattgcagatatattgctgttgaatttgcttctatatggaaagggatgggtgcgcacgtagacttgttttatcgaaaagagcttcctctaaggtatttattataatctgttatctgcactgtgacctccagatatttaaaattgtacaccaaaacaatttactgctcagtatcagaaaaaagaacatcaatgtagcttctgtagttgcagtttttatgtcataatgtggctagagttgatagcatggttttctagtctaactgaagcttttggtcttgttttcagggctcagtcatgtgccactttagttactgtcctattttgacaatcttaattttttgccaaccctggtggttaatactacttgatcttctcgttttgtacattgatgcaatttattttctgaacattttttttgcaatatcatcaacctacaatgaaaacatggatgatgaaactagttatcagataaaacgatgcgattgcgaagcctggaccatgctatctgaacaactgaataatgattatggagaaagaatgccaatgtcatttttattagccaaaatttcaagctattgattacggttctatccaccatgattaatggcgaattgactaattgcagaggtttcgatgatgagatgaggacggttgttgcaagtaaccttgagggaaggggaatcagattacatccagggacaaatctatctgaggtgagttaagctgacatcctaaagtgcattttgattcccatgtgttctgttttcacgataggttttgatctgtttcttttttatgtaaaccagttgagtaaaacagccgatggcataaaagttgtcactgacaaaggagaggagatcattgcagatgttgttctgtttgctacaggtatttaggatagttcaatgctgaaagttatgttctctgtcactttaataatttctttgaatacatctctcttgatgactgttctgtgctggatgaaaaaaaatcatgtatcttctgatatttcacatggtcaagcaccatatgcatgtttgaaattgatcaatgtcatcctcacaacatttttttttatctcttgttgttgggaattgagatgctcaatatgagacattctacttttcacactatatttggaatgtggcatttatcctgattttcttttctttgaaggaaactttaatattgttgctatgcctggtatttaattgcgtgcaggtcgcacaccaaactcccagaggttgaacttggaagctgctggtgttgaagttgataatattggagctataaaggttgattttcttgccttattaattgaacccttacctgttaggctgttagcttgctgaagacatatttgttcatctgaaatttacttctcgtatttccttggagaaaacttacgcgtgaacctatgtgagaccatcttaggcatttaattggccattatctttgtatgatattctttgagactacaagtaatttgtgttgtttattcaatgttctatttttaggttgatgattattctcgtacatcagtcccaaatatatgggctgtgggtgatgtaacgaaccggataaatttaacacctgttgcactgatggaggctacctgcttttctgtaagtgactacagtgactcataatccccttgtaaattgggtgtgttcaaatttctttgtttctgtgtaaccagcaactttactttaatctttaattgcagaaaactgtgtttggtggccagccaactaaacctgattacagagatgtaccttgtgctgttttctcgtaagccaataaaccttgattgttctctgttatctccagtttttgtttttaactgaaacaagtagcatctacaagatggccacatatatacttcacaactctttgcttttgacactttcggtgaggcacactgtggtttggttttcttgtctgcacttcgaatgtttatttgcttagatcttagcagtgaaagagagtagcatgacgtgatatagggtaacttttctattcttccaggtttgactgagcagcatgaaacttgtgtgcggttgttatgctggatgtttcttaattctaattgatgcctatgtagtttagggtacattaggaagtaagcaacaattaaattctacattaacaaaacatggactagaatctagatagaaaaaaaattagtcatttcaatagacaagatctaaggatccttcactagtgatttttgcttttgccagtgcttctaccaatctattattcagtgcatttatggctgctgctgctttctttagattatctgcttttccacaatcatcgtgtcactcataacatggtttctttttttgttgaattagcatcccaccactatcagtagtgggcttgagtgaacagcaggctttggaggaagccaagagcgatgttcttgtttacacttccagcttcaacccaatgaagaacagcatatccaagtaagtatcatgtttattgcaagatcatctgttacgtcatagttacacctgactcctgagtgctttatcacttgaaggttctgggtatttcattattttcacttgtcatggtctcatggaccataaacattctagtaatggagcctatcagtgtcgtcattctttatagttcctgttctggtgaagtttcctgactcggctcactttttttagacggcaggagaagaccgtcatgaaactggtggttgattcagagactgataaagtacttggtgcatcaatgtgtggaccagatgcaccagagattatccaggtaagcaaagtttgtgtgtttatttcacacacaaaaaaatcgtggcattttccagtcttcactagtattttgcacctgactttccaccaattgcagggtatggctgtagcgctgaagtgtggagccaccaaggcgacctttgacagcactgtacgtggacacaacaataaaccagttgttaatatcatttggcactcgagtttctaatattatccattggctttgcaggttggtattcacccgtctgctgctgaagagtttgtgacaatgcggaccttgaccaggcgcgtgagcccatcatccaagccaaagacaaacttgtaggcaagatgagtaattttggataaagaaacatatatacccgttttgatttatattttgtggcaaagtgtactctggtttgcatctggtaatttcacgttagggattctacctggaacggtaaaaaggagacaatgtatacttgattgaaataaggtttctgcatatcagcctgtacagagagtaaaacttctgcgtttttctgatccaaataagcgggcgggacatcattcgttctgcctgcagacaaactctctgaatatcatccattgctcactgtaaattgtaattgccaagttgagaacatacaggtttgggacaggagatgagatctttgtccgccgccggattgtgtgttccggtgggcatcggcaccaggtatgatgagtatgagtatgaggtgtgcaacagcaatgtagcaatggtccttttccctgagacggcaatagcatatggtccctgaccggacaccaaatgcacagcagattttgcaagaagggtatcatcttgtcgtgccaattggtgtcttcaatctctgcctggtgcctcgcgcatttacgaatactactgtgctgccttgaatcctacctgcccactcaagatttgctatatctttcatatggttctcgtttgtggcgaggctgtcatgagtgaatgcctgtctcgtaatcgtaaggagctctctctctcaccacggctcccgtgtgcctactctgtacgccctgcacgctgctcactaacttccatacgcgtttacgccgcagctccggtcaagcagctacaccagcctgtgcgtctcctcgctttacccgtgcaactgccgctcattgccactgaatctggcagcaatgcaaagccgtatggatctttctgaaccttgaatgtgccatgggagatgcatcttggaatctcaacttcgctgaaacttccacgggagatgtatccggactctgacctccttttactgaaaatgtgtactgtgcctgtaattagttcatggtaactactctcctcattaaaaaaaaatccaattctaaaaacgtatccgaacaagatacatgtttagatatatctttagaattagattttttttaaagtaggctgtgtttagatccaaagtttggattcaaacttcagtccttttcaatcacatcaacctgtaacttttcagtcacatcatctccaattttaaccaaaatccaaactttgcgctgaactaaacacagccgtagtggcttggctcgtggaggctgggtttttttaacccattattaaattaaaaggaaaaattgtaaccatgccattataattttacaaaatttgagatatgccatcctgacccacatgtcattgactcatgtgggtcttacatgtcattgagatatcgatggcatatctcaaactttaaaaaattataatggcatggttccaaattactcttattaaaaagaactagtgtggctgcctatagagcaagtttaatagtacagtcaaccgtgagggctaaaaaattaacacgtcatctaacagctaattaaaccacgctaaatacagtaaccgtctatagtgttgctttacccaacataaagttctgtttttttattggctgttcacagctacctcatcccttgcacagggctgcgtcagagcgagcgcatgagccgacgataatatagtcgttcgcttttctctctccgctctttctctctctctactatgtatgttaaaatgtgatgtaagcagattattagttcactattgtatttgctctagttatataagttaggagacgacgtcttcccgactctaactgtactgtatacttgattaagctagcagtagacgagatccgatcgagagagataagagtaggaattagattgtcccggccctactgcattaacgaatgaatgctcctcaagctgatctggctgacctagcgtacaagtaaagagttgtcaagacactcaaattgtcaaattgagtacactgagcaagctaagatagtcgtacgcgttaggcatgaatatatgaggtcaacgaaaaaaggtcaagttaacaatggttgggtagcacatttaattctgtttctggaactcttggtagccgcaactaaccatgcatttttggtccctaggagtaaaagaaatcatcaagacagtcgcatacaagcaaagtttactaaaaattctcaaaaacgtgcttggaacatgcctaacaggaacagtagattttttttttttgaattcgtatgtgcgcgtatataagcaactcactgaaaatcttaatttgatctaattcactctagagaaggaaacgtgtccttaatatatatatatatatatatatatatatatatatatatgggggacgcatcatcagctatgaaaacgtaaagtcaaacagagtcagctggagatatatgaacgttttagccacgatatattatgcatggtttagatcgttgttttagttggtagataactaataaattaagccatgcatgaaaaggaaagtattaaattgccttgactttagcatgtggtataattttagtccctgtgaccactttgtttgacaagcaataattgagtgttccagttctagcaaatttggactttggaccatcgcaaaaagaaaaactgaactttagacagtataatatgtaaatgccacactgctgatagataggaacaacattgttaacatgtaaatatttcctccaaaaaaaattaatatacaaacactgcattcatggagataaaactaataattaatatagcatgcaatggagattatgtacatatcacagtcgttgccccctggatcgagtacagggcaattaattagttacgtatgcaaggatgaatagctaagctttttttatatatactgactgtagcaaaacttaatcaggaggtcttactacccattttgctggtcaacacagttgacagtgacctgtcaattattgttccacggtttttttctcagtcgttattgtgtactctcgtttgccaataatgtaatacactatatattgttaaaacaacatataaaacgcgaaaaagctacgtacgtttctaggttaattgatgaggggaaaaagagagattgttttacatgttgattatgaggaatctaaattataccagtgcatagagatgccagtatataatgtataattaaccacagaagaaggcctgcatgcatgcatggtatttttgcatctaaacaatgtggtcttactattgggtttagctctttcaccatcacgttgtgtgatgtacagcttgaatgctgaacttttgtactagctattgtcaccccaaaatatatatctgaatatgaattaatttaggtacatatttttagatcggatgtagaagtaactttttagcgggaaaccgccttaagctatctacaggccggattttcatctctctttttttatagaaaaagacgatcgatcaataatatgcgtgttcaatatactactctagctacttcctccgttttatattatataagacttttcagtattgcctacattcatatatatatattaatgaatatagacatatatgtgtgtctagattcattaatatttatatgaatgtagataatgctaaaaagtcttgtaacctgaaacagaggtagtactcggtagctatgcgtgttcaaataaaattcctccatgaagcagatgcctacatacatgacgaaaattatatactccatctgccttaaaatataggaatttttagcatagtgacaagtcaaatattttaaactttatctattaataacaaaaaaaatatcaatcatgtaaaattgatgttactagatttattattaaacaatctatcataatatgtaactctttttatttaaaacatcttatctattttatagatattgttggtcaaagtgtatctcgaagactatgtcagagtaataaaaaatacttatattttaggacggaatgagtatcaagagataattagtgaattaagcttgcacgccagcctgcagtacgtctagtcctacagtactactagtagccattaataaacaagcagcaggttggtgaggatgctgatcgggcgtatttagttcgcgaaaagaaaatttttaggtgtcacattagacgtttgatcggatgtcggaaaaagttttcagacacgaatgaaaaaactaatttcataactcgtctgaaaattgcaaactagctagagatctgcactcatttcctatacatatttcgatctattagctcgaccgaccagaaaagttcggcgatctcccacgagatccactgaaaattttgctactgcagcttcttcgttgtacagtccatcacatctcccatatggccatatgcttcgatcgatctcatcgatcatcaatgcaggcattgatcaatgatcgatgtatatgcatgtatgccaggcctaacgcctaacgaccgatccagcaaattagtcctaccttcgtctcaaaatataataattaatagctatgaatctatataaatatgtgttcagatttatagctagaaatacggaatagggagcaataattaattgacgagatatatcgtccaatatatatgtactatagatagttgccgatgtgatgcatatgccatgcgtgatgcaaagcagtgaagtaccatgcaaaaactgcaaaaagcacaacggccatccatgcgtcgatcaccgacggatcgtacagagatgaaacgatcgatgaacaatttaacatcaatatatataattgaacatgcatgttgttcttgctcgctaccaacagtatggttggcggagcaaatgcgcatgagcaaattatattggcctaaaaaggcttgcttttcctcgtgaggcaacttaaagcacaacagctgatagcttgcctacctgcagaagcaaagctttcaggtacatgtggaactaagctagggaagtagggaactcacggccaacctgcagcctcttgccggcctggattaattcatcctaacttcttaatcatgcatgatttattagttcagagaaataatgtccatgcatggattaatgatgatctagatatgactacatctacgttgtcatcatgagtcgtcgtagaggttgtctagctagttcgttcccttcatttcgacgccactattaataatttccaaccacgcatgcatatataggagtatgtcttttttctcctaaatccaatattctgaacaatgcactgcagattgatcatcagcactgatgaatttcatgaatactcctgtatgacaagcagttgaagcagtaacgtacatgactatctaactagctagatgtgtgatcgattggctaaaaacacgtacaatgcagacaagactacaagtagtagctactagtagaagttaactagtcgtttatcctatcttgtttagacaatcgatttcaaccagctcagctgcagacaaattaattaaggacgactactgttctcgcgacggcgacgaggacgacgaatttgacgaaatgcatgcactgtctcaaatcgagacggtgatatttagccaaagtcaagtggtgtggagattgatttaattatctgcatgtgcaataatcttaattttgcatgagatggaggtcctgcaaccagaaacccagctgttaagtgagatgaccagaaacctagctgcagcgctgtttcgatctggatgtttccacactttttattcagcttttacattcttttagaagtgggaattaattagctagcttccgttgttgtcagttttgtaaggtgatgatgagtactgaggtatttcattctccacctctgttcattgaacttaatcggtttggcgcgagaggcgcggccggcggtggaggaggcgacctcggtgcgaggaggagttgccggtgggtgtggtgcggttttcggcgcacaaagactggccggcggaggccgccggtgtaggggtcccgcatgtcgacagagctggagaggtggtggagcatcggtgcgtcagccaaggattcgcagagagggcgatcttatctgtgttcctttgttggtctagcggcggtcggtcacgcttagcggcggccggtccggtgctagccttctcccgggttgtgtgttggcgctgtcggtgtgtgggaggtggttttttttccttttcctggttacgaccctccagggttgtaatcttgtaattttttcctgctctatcaatagaacttcgcatcgtctcgtgcgagtcgttcaaaaaaaataaattttgtgagccgtgaagtgagggtgattcaacatgctagttttgttgtgatggatttgtccacaaatgttcaagttataaatttagcatggatgcttacatttacaatatttacgactaattattctttcagcgatagggaacacacccatcgataacgagagttcgtggtgacatcgtcaatatcgatatatatatatatatatatatatcgtctaatttttttttagaggtgcttaattatatgggtaggatttgcgtgtatttatagctgcgagtgcgtgtggacatgcatgagcgtttgcgttcgtaccgtatgttaaaaaggaggaggaccgaccaatatatgttactcctagagagagtactcccttcgtcccataatgttgcaacctagaataggatgagacccatcctaggactacgaatctggacactaggatgggtctcatcccattctaggttgcaatattatgggatggagggagtagctagctagctcatctgttcctacacgtacccaagtgataaattttgaaaggaatacagtaatacagtactagccagacgtgggagatcgcagcaggtaacatgcattgtgcgtgtatatatgtacagggagctcgccgtaagcccacgttgttaatagtcgtgcacatgccttattactttccaattaattcaatgttatctccacctacttactgtcaagtgccatcaatatctgaccgcgttgtgtacgtgcatacgtatatatatgcaggtcttaattagttcatttttactacgtgcgtgcctgctaaatatatgtacatatatacataaacacagtatatatacagcttacatacggtcttgacaaaaatacatcatgcacggtccacggaacaccacatctaccggttagccaaaaagaccagcccccttgctctctcgatcgatgaaagatctttaagctggttcagttgtctcctcgatcactatttccatctcctctctaaaacaaccttattctttcaccgatggacaccagcctctcccttttgtcttcgttgttagaataggtgtcgaatatactagtcctatttagttacagttggacttggagttgtaataggtgttagggggtggagttagagtcggactctgtaacccgtcatctctcttaaatagagaggggggcaccacaatgtaagaatggcgactacaatgtagcatagacacgcagggagaggatggcggcgtagccatggactcgtagcggctaggagctatattggttggggaggagcgcccataatcagagccccggggatgtaggattcggctgaacctcgttaacaaatatcatgtgttcctgtgtcgtcatctggcatgtcttgggtcatcaatgactgaagcgatcgggagggttagtcgtctttccactatatcgactaacttttataacattcgtacctacctctcattcgcactcgcacgcctctccatttcatctctaacatatataggggccagtagatccggtggctcctgagctccatctgctcggatccaatggaaggagctttggagccacgacgaccctgcgtttgaaaggagaaggggaaaaggagggcacgatggtaaactgctgtggagtggagtggcaacagtaaaacccggcgagcctgcatgtggtgaagccggtatcgttgtgtacttgtgcggagatcagctcacagcaagaggaacgtacggaaacgtcaactgcaatataacgtgttggatgaattgttcctacctccgttttttttaaatagatgacgccgttgactttttatcttgtgtttgattattcgtcttattcaaaaaatttacgtaattaaaatttatcatggtgtgagttgttttatcactcaaagtattttaagcatgatttatatcttatacatttgtataaaatttttgaataagacgaatggttaaacatatgtttaaaagtcaacggcgtcatctattaaaaaatggagggagtattaatctgtttgatattgaaattattgttctgttgaagaattcttgatctattcctggcatatgtatgtgagtcttctcttggggccgctctaagcattgacttaatgaattcaaaaccgattgattgagacgttgttttttttttcttactcttgcaattttatttcagacactagtgagctccctcattagtgccaagaaagaaattaatgtcctcatcagggctgtgaaaaagaagtaacggtttttaaaccggtaccaaaaaaactaccgatacccaaacatatagtagcgtgataaccagccagagatcaattaagttctgccaatatatatgcatgcgcacgtagaattgttgtcccgttgatccattgaagaagcgcaactagctagctagctagcatgagcggtgttaattaacgtactgtatgttaatttagggacaaagagagcatatatataattgagagcaacagtgtcatactcccaccgttccatagagtcgttttgaatttttttttcttagtcaatcttttatcaaatttataaaatataataataatagtttcaatataaaacaaatgaattatcaaaatatatttaatgttagatacaataaaactaatttagtgtttaattttctaaaatttaactttggaaaaaatttaaatatgagtgaacgtagagttagcgggaaagtcgtctctctaatctcgtgtgagctgtgtgcatcagtcagcaggtgagtgcacggtgaaaagcagaaaaattaagcacaagtacatcgatcaggtacgtcaggtacgtcacgtgtgtgtccggtaaaagttgaaggtgaaaactgggaatatagaaatcattagcgtcgtatcaatcatcaaggtgtagaaatctgcggccggattggtgccgtttggattacggacggacggagatggagcagaggtgtgtacttcggttcatttcgatctgtgcacggctcgcacggggcatgcagcttaactacgacaaaaaggcaaaaaacttaaataattaggctgtgatgggcagaagtagattgagtgaaaaaaaaataaatttacagtgtaattataatataattatattatatttatatttgataaagttttaagagaaaatttgtcgacaaatgtatagtcagtccctttcgtttttaacgtgaaagtttctcgaacagttaaatagtggagtatgattttattttaaaaaaatatgttttaaaaaatatattaatttattttccaagtttaaaataactaatactagattaatcctaagttaatggttcagctagttttgcatctttatcaattttctccaataatgtcctctcgattctcgaacaatggctaatactccgtgagagcaagtttaatactctagtatagctaactattagctctaattcatctatagtcaatctaatagctcattcatacaatagttatatactacactattaatacctggtcccacctgtcatacacacattgtgtctggtaatccgtgctacagctggctataaatctatagctcgctctcttctctctctttatttatatttttaaaatatgtttgcagttcgtcttatagccttctatcgtaactattggctgcctgcgcctgcctgcaggctgcagcgagcgaccaatctggttgggcgttggccgccatacgaccagatcgaccagagagcaaaacacatgagaaatccaggggtcaccgcccgtacagatccgcgcccatccatccatgcatcgtcacgcgcttttttctccaaaactccccgtccgccccccagaagaatacgtagccgttgtgtcgcgcctctcgcgtgccaaccccaaccccaccactgaccactctatatatacctcctccaccccccgccacacaccaccacgatccaacgcattttcttccacaattgcacgtacgtggagtatcacggtatcagtagtacgtaatggatttgctgccgctggtgacgctgctgctgctggcgcacgcggcggcgtgggtggcgtggcaggcggcggcgcggcggcggcgggcgacctgctacctcctcgactacgcgtgccacaagccctccgacgaccgcaaggtcacgacggagctcgccggcgccatcatcgagcgcaacaagcgcctcggcctccccgagtaccgcttcctcctcaaggtcatcgtcaactccggcatcggcgagcacacctactccccccgcaacgtcctcgacgcccgcgaggactgccccaccctgcgcgacgccctcgacgagatggacgacttcttcgacgacgccgtcgccgccgtcctcgccagggccgccgtctcgccgcgcgacgtcgacctgctcgtcatcaacgtcggctccttctcgccctcgccgtcgctcgccgacagggtcgtcaggcggttcgggttgcgggacgacgtcatggcgtacaacctctccgggatggggtgcagcgccgggctcgtctccgtcgacctcgcccgcaacgtcatgctcacgcgcccgcgcaccatggcactcgtcctcacctccgagtcgtgcgcccccaactggtacacggggaccgacaagtccatgatgctgggcaactgcctcttccggtgcggcggcgccgccgcgctgctcaccaacgacccggcgttccggtcgcgcgccaagatggagctccgctgcctcgtgcgcgcgcacatcggcgcccacgacgacgcccacgccgccgccgtgcaccgcgaggacgccgacggccgcctcggggtcagcctcagcaaggcgctcccgaaggccgccgtgcgcgccttcaccgagaacctccagcgcctggcgccgcgcatcctccccgccggcgagctcgcccgcttcgccgcccgcctcctcctccgcaagcttctccgccgcaaggccgccgccggcgccgccgccaagatcaacttcaagaccggcgtcgaccacttctgtctccaccccggcgggacggcggtgatcgaggcggtgaggaagagcctcgggctggacagctacgacgtggagccggcgaggatggcgttgcaccggtgggggaacacgtcggcgagcagcctctggtacgtgctgtcctacatggaggcgaagcggcggctcaacgccggcgaccgggtgctcatggtgaccttcgggtcggggttcaagtgcaacagcagctactgggtggtgaccaaggacctcgccgacgccggcgcctgggaagattgcatccacgactacccgccggcgaacttggtcaacccttacatggagaagttcggctgggtcaacgaccttcccagccagggtcagggaggcgcatttcccttcttttaattaattattactattactggtagtactgattaatttatactcaatttattattactaccatgaatccgtataatacatatagcagttctgactgtggtttcttagttaattaagccgtcaaaattaagaaactacagtcagaattgactcaactgttaaaacttgaaaacaatcgtcacacaggctgtgtgtaagggactgtatgtacggtgtttatacggtatttttttgtggttttatgtgttattacaatttcgtttttttgtgtatctcttatccctttggtatatatttttgcctgtggatatgtattaacttacctgtacatgtttaggccacatgcatgcatatatgtatatggcacactgcagcagaaagaaggaatactgctcagggtgtacatatatatgacaagtaacagcaagtgtgtactttgtgtaacctccaaaagaaaaaggaagaggatctggtatttggatgtgcatgcatgcatgtggccttccacttttacaggaagattttaaatgtatacaagaaatttgagaaaattgtctctctttttaaaaaaaacatatctttttaaaaggacattgaagtggtactgtatctgcatgcatgtgtactacagcttaccccagcagcttgtatctattgattttctttctgggattttatatatgatggtccattaatatgcatggctctcttgctgctttgagttggtgtgcaataacaatggcactctgcaaggacttttgccaggtaacaaggacaactatggtacatggtacatgcatacacagctaagctaagtaatggtgtttcaaatttttttttgtgtgtgtgtgttttgaatgcgcaagctgaagtaattggtagactgttcattaaaatatatatttttaatatggagtaactagttagatggtgtttgatcaaacgaggtgaaatccattcaaaggatcaaaagagttcctctgttcatccatggatatctatccctgctcttcggtcgtaaattaatgacgttcttccaatggtttagaacaaagagaacgtaatttttcgtagctagtcatgatattgcgtcgatcaatatcagctactattatagactagcgattttcatatatatatatatatatatatatatatatatatatatattctacacccctccctagaataactattctacaccccccctccctcccatggaccaatcccacctcccgcaccctttgtagggcccaaatcccccctcccaccttagtcaaaggctggtcaaagcctcctcccgccggttaaaccagagtcaaaccgtccattggctccctcccccgcccaccactttactgttcatgtctcgcaggaataccgcagtaacataatggtcatcgtatagtaacaagacaactttctcgcagtaacaacatcgaaaaatagtcatgatggatctagttttgttaaacacttttttacgaacatcatggtgtaaacggattagaaaaatactatataacgtgagagatattactctctaaatattgagatttacttttttaaagttctcgtctcgctggaacgatatagtaacgcgacgatcattgtgcagtagcacgactactttctacagtaacaatgttataaaagcatttttgtctcgatcattgtgtagtaacatgactattgtctcgctgtaacatcgttttaaagcattatggtgaaaacgattctaaaaaataatatgcgatgtaagagatattattgtttaaagattataattataaaagtttacttgtactaagcttgctactatgtatgtatctttgtatgggtaaagagaattactttagcacttgtgttaacttgtgaccatgcacatgcacttttttagcacttgtattttgcacaagattgagatttaaaacttttgctatgcacaagttgtggtactgtagtagtaccgttactatcatatgctctctgttactgcaatttcatcataatgttattgaaaaaatgcagtaacgacctataaatttcacagtaacgacctataaatttcacagtaatgtatcgtgttactgcacttctgcgataatattactaccgaatcacagtaacaaggtatgattcctacagtaaacataacaggtttatgttcataaaatctgaacagatatatagagaaagcaaacaatgatcccaaatcacatagtgttatagggtgaattggttaggagagtttgttataccatgagatcatgtgttctagtcttgaatttaccaatttaaagagaaaaaaggagaagggagggagagatcgggaggaggggagggagagatcaagagagatcggcagggagggagaagagaaaaaaaaagaagggagggagagatcgagagagatcggcgcgcggaggaagagaaggaaaaaaagagggagagacgcgcgtgggggctgaagagggaggcacgcgcgtggggtgggctgggccggattgggggagttgagtggagggggtgtagaataattattctaagggaggggtgtacaataaagcttttatatatatatatatatatatatatatatatatatatatatatatatatagtaaatttgtttggtgctccatggtgcccgggcaccattgttgaaattgagtatatacccaattcaaatgagtatgaaactttttcaattacttaggtattaacattaactactttactaactagtttaaagcaagtttgaactgaatttgaacttgtttttgttagattttgattctaggtatatagcatccatacatataattagttaggtatgtaatcatggattgtgaaataaagttaaatttgagttgttttgttgataagtataggtatgaatcaaattattataactaggtatatactcacaatttgaaaattttgaaaaatttgagtgattttgtgcattagataccatggtgcccgggcaccatggtgccccatatgagtgtcatatatatatatatatatatatatatatatatatatacctaattaaaaaaataagcaaagcttccggtaaaaaaaatttcgtccgtcctttcctttttcaccgttttcctctttttttttccgatccgtttgcttttcgttttcctcttttttttttggttttccgttttttcctttccttccgtctacttttttttcccatttgttctcgccccttttttccttttttttctctgcctgcttttttttccgtttctctccgtctgtctatttttttccttccattttttttaccttttccctcttttttcgtttttttatccgttattttattattactttttttttggtaggatttttttatctgccatatttttttcgtcgttgggtcaaaccctagcgttgtcgtcacgtcgacaaaaatcaattagtttcccatgctttccctcatccaattagttgcaaaaatcaattccccactactctctcatcattttctcatgattttccacattcaattctgctttaattcaccgaatttaatctctaattgaaagtcatttttatcaagttttgcggattcactccgattttgataaaaacaaaaagaggagatcgagtgtatcaaaagtcctcaaccaattttagaagatcgagacagattcgaccgaatttgatggggatgatcggttttggcatcgtatggacatgagactgtcttctagaggttgaagacggcagttgactatgtgagctggaattgcagctacacttgtgggttaggtcttagagaggcaagagaggtaggcccagcagagggaggtagcagactgggctaggactataaaggaaataaggaatgagtatttgtccaaaaccaaagaaaaatgtacagcgatccaaaaataattttacccgttgcaacgcacgggtattttttctagtgtgtatatatatatatatatatatatatatatatatatatatatatatatatatatatatatatatatatatatatatatatatttgataccatatgcccgggcactatggtgtcgattcatggatatatatataggggatgagatgagatgagatgaggacactgggctgtgtattctattaggagacagtttccgaattagtgggaacctattgatgaaaccgagtggttaagaggcagcagaggacgacatcgatctagaagaaactaaataatagtacgacggaggatgaacaatagatcgatgctggtgatgaacttaactggaccatccgattgtcatcaagggcatgcaaatactgatgtactccctctattttttaatagatgacgctgttgattttttcttatatgtttgatcattcgtttaattcaaaaaatttacgtaattataatttattttgttatgagaaaaagtcaacgacgttatctatttaaaaaacggaggtagtacgatggactggttcgtcctctcatcatcaatcaaaatcatctgggtactacgtacgtcatatatatggccgtgtgcatgacggcatggcaatcggatctctatatgatcacgagataactgaaggattggtcttccagtttttgtcctgacacacaaaaatcctaacgaaaaagagacatatggtgaagaaagctattacctttttttttcatcaactaggcctaatttttttcatctattccaaacttcaagttttctgttaacacgtttttcaaacggttaaatgatatattttttaacaaaaatattctacataaaagttgtttaataattttttttaaatttgtaatagttaatatttaattaattatgtgttaatgagtttattgttgtttcgtgtgcaaagaaaatccttcaaactcatctaacgaacaaatctactggtgatgatggatgaaatgatattccagcgtcggtgatatcgatgtacgttgtgcttgtcgatagtcaataactgaactgtgtggtacatatatatacgcatatgcatgcaacagatcatacgtatcatctaaaatatgatctgtagctgttgggatcccccggctacatgtagatggatgcaaagctagcgtgcgtacgtacgtagcgaaattgaagtagaggaaaagtgtggcttgtgcgtagtggtatagtacagtggtacgcgtagttgttggatctgtgccatggcggagggacacatgaacgtggacagctagctaataaaaaggcaaaaaaggaatggaaatttcggcgtacacgtacattcagtagcagatcgatttggggggagggggggtggggggtgaaaacggtcagggagattccgatcgaccgggcgccgtttccttcaaggagtatcgtttccgagttccgatcataacgtttttttgactattttttaaattttattttttctaatttctttctgtaccatattaatgttgatattgaatagtttaaatgataaatatggttaattaccggtcgatcgagcatcgttttcgaaggaatgctaccgattccgaccgttttcacgatacatgcggcaataataaaatcagccaaatctctgccaatgcaaatgcaagcgcgataattatggttgaattgaatcgcacgggttgtcctcgacattattcggttaaaatcaaactactggctggcctggccatgatcgtgacgccggcacaggctatgccacgagaaaaaaaaattaaaatgagcggtaccctctccgccccataatgcacgatatgtacatatttttttaagcagagatatgtacatattttaagattcggttcttaaaatatttagctgaccactaatctaatataaattaaattttatttgacaaaaatattacttcctccgtttcacaatgtaagtcattttagtattttccatattcatattgatattaatgaatctagatagatatatatgtctagattcattaacatcaatatgaatgtgagaaatgctagaatgacttatattgtgaaacagagggagtattttttagcatttgaatatactttcttattgttatgatttcgtatattgtcgtatacgaagaaattaaaatttaaagattagtttggatatcatgtcaagtcttgttatgccttatacggttggtgtgacagagatagtatatactccctccgtttcaaaatgtttgacaccgttgacttttcagcacgtgtttaaccgttcgtcttattaaaaaaatttataaaatatgtaaaactatatgtgtatatgaaagtatatttaacaatgaatcaaatgatatgaaaagaataaataattacttaaattttttgaataagacgaatggtcaaacacgtacttaaaaagtcaatggtgtcaaacattttgaaacagagagagtattagattgcctacttattccttgtgtattgtgaatttagtacagtacacgatgatgcatgtgtacgtatatctatatttctcctggaatgaagaaaacaattagaaaaaataatttagtcgatggggcagcagcagtagaactgaagatcatggaaggtgcagaagccattattttgtcccaggccaatgccgatgcagtaatccgtacagcccttggggtcgcacttctccatcacctcgcactttggatcatccaatatcaccaccgtcttgctgctccccactgccatagtattacgtatatctgcccattgattaattttacttgttaactgcacccacggttggttaatcagacacaaattaagcgattacctgggtgttctctggatgcatggcaggaggaaacaacaagaagaagaagagcagccggtacagcaacaagagccaggccaaacggcgctctcgacatggccattgctcctgaacctgatcctcttgctctctttgatgctcttgatttttcacttgctcctgccttcttagtctgccttgtatacatactgatattatatttagccgcatgctagcggcatcaacgctcctgacatctgcttaaatgccaagatttgcttcttcaattgtttcccttgctgtccatcacacaggctgtctttcacacgtctgctaaaaatagagtcggattgaatgcacatggaagcgttctgataacgatcatccgtcacactatctgctggactttacagaacaaacgtacagactgttaaacatcagcgtacatagctgcctgcagaaacttacaactgcctgcgatagtcccttgttgttaacatcactgtacaacataatctcaagactcgggggcttatatatcatctatcaaccgccggacaaattgcagcgagttcccattaaaacaccgaatattgttacattttacatctcatactagaacattaacaacatgaaacagagagccaactttaggccttcgttccttatcttccttttgtgctacatcaacatctatcatcaaggtaaaaaaaaaaaaaaaaaaagaaacagcccctcccacaaactcactgcaatacgcactgaacagctcaaccgcgacaatcgcccggctcctactcttccttatttgcctctgagatagtaacacaactcaaccagtacatcaaactcacctccattctatgactagcctaggctgaagaaatccagtatcaattacctggaacagctattcttatctctaggtacgttattgttgttacttccacaacttgacagagttgtcgtggctcgcagaagccaccgtcccgttcactggcgattgcgccaaggccgcaattagaccttcatgggcttgtatcgtcatgctctggttctttaccatgttccatagctccagggactgcattgttacagtgtccatgagaaatttacagcaaacaaggtacagagtgttcatcagaagtaacgattctcagattccaaaccaaatatcagactatgccttggcttggatattacagcattctgatgagagccatgccacagttcttgtggcggagaactcaatgccaaaaaatgaaatgccactgcataacgtgggatatggcaagaaattgcgtcactggcaggtctggcactaggatagttttttgtggcgttggtaaaccagcagcgttgttaaaaatgaccatgggatgttgcaagatgaaaaaaaaaaggaatcatgtctaaaattgattgttagaaacatgtctctccctatctttcagggaaaaaaagggtaaattttacatacatatggctaaactgaaagaaaatcagtagttacctggtagcctccaataacaaggagattggcatagcttgggtggaacacacaagagtggaacttgtttccattggagctaacctcatgaatgcactctcctgatgatattgaccagaccttaaccaagtcctgactgacagaggcaaggtactccccactgctgtcccaacacactgattgcacatctgtgttatggccctgtgataataaagacttcagatacaagatcacaggcaaaaaaggataaacaacaggttcccaccccttctgaaacaagaggtatactacaaaacatggaaataaagatgtgcatgttttgaatcatagattttttatttttttaaaaaaaaaacagaagagcaatagctcctcccctttccattaagaaaaagctagttcagctacaggaaaagacaaaaataactgaaaacatccactgcgggttacacaacaaacagtgctgaatcatagatgtgttattgattttcaagaacagaacctgtagtgtgtattttttgctgtgcgtttcaacatcaaaaatggcaaccatagtctccgcagcagctgcgagaaactgtccagtgttaggttggaatcgaacttgggcagtacctccctgtccaacaaaaacagaatcagatggatgaacctagaccatacaaaccatgaattcttcataagacaaaaggtgccgaaaacgtcttaagcaaacaaaaagaagatggcaaaccttcatggcacgcatgcagctaagctgggtcagattccagtaccggatttcaccattgccatcacaagagcacaaaaggtccgtcttctttggatgaaaatctaaagatgtgacttggacattatgcccaacaaacgtatgcaaacagaatccaggctgcaaaacaacaattttcataataaaattaaatgcaagtacatatacggaacttcagattaataggttggacatactcaactctcaatgccaactaataatcgtgaccacaaatatatactttgtgctgtcagatattagtgatatggtatatttgtgaaaattttattgcaatgaccagtgcattaaaagaaagtgcatgtcactaattgtgggtaccattgctccaggaagaataatctcctatgccactttcatatacatatacaaaaacataacttacatctgcagcattccacagcttaatagttctatcaaaggatgatgttgccagctgggaagaattaggccggaaacggacatcagtaattatgaggctgtgttcttctgatgtatactggctctggaaggtgtccatgttccaaagtacagcctaagagacaacaaacaagttaccatactaaacccacaaaaaccagcagtgtaaaatgaagtccatttactgataccttcttttcatgtccagcgctagccaatatcttgccatctgaagaaaaatggcaacagacaactttgctattgttcgtgcgcaaacaattaacctcattgaaggtaaaacctaaaaaccaaaaggtgtgttatttcatgtttacagaatacggaaaacatcagggtattaccttttgaagccgctgggttaggctctgcaggacttcttttaagtgcagcaaaaatatcccttgcatctccatcatcattggctaagaatgattcaacattatcttccaaagagccaacatcaccaaatggctcgagatcatcctgttaagtacagaaaatacgatgcttatcatctgacacaaataatcgttacatacatccaactaaacatcttgaatgaaatgagaaaagttgtaagcctgtaaccatttggtttgaagaggatgctagtcctgttccgtcagcaccatacatcactaaatttttcgggacgtggcgcatattgccaggcatcccaagtccatctcctggggtatgcgtggatggagtagatggtggagaattggttgaagggccaactgtattccctgttccagtactatttgctgctcctgaagatgtaggttgctttctttttctattgctctggagataaataataataattgtagaacaaaaaaatggatatatggtaagggataagtatgtgaaaataagcaaaatgaaaatttggaaaacatacacgcagccagttagccatggttcaaaacttaaattagttttccctgtgaccgtttcatatgtatcccctgaaaaattcacatgtagctcctaaaaatatagaaacgtgtattaaagcatccaaatttatgtgatggtgttctactttcaaaaaactagttgggcaacccgcgcaattgcgcaactagcatcaatttaaaataatctatttttacacatgattttatttaaaactatcattcccgtgattctaataatttcatagttcttaaaagtcacatcagtcgctacctcttactcctttgacacctttttatttgcttactcgatctaccactacttctattcatcatctttagaactttaaaatttaggccttatagtttttagagttcattgtcttgttaggtctcgttttcataatttttagaagtattgtcaaacatcgccaatttactactctatggcccgtccgctgccacctctctttattatcattgggattttaaaagtcgaacataattattgtttatgttctttcttactttctataagtctcgccagatcgttagtggcttcgcccctatacacctctacagactacagcctgcccgctgcctcccctccttattgtcattgagattttaaaaatcgaacatgattatcctttgggtttatttttactctccataagtcccgccaactgtcgtgaccacgctacttaacggcatgcccatcgtcgctcctcttaaacgtcattgggattctatttggggttttgtttatagtttttagatatcccatcaaccgataatttttattcataaattatattcctacttgaactcttataattatttataaattgtattctagttgagctattatttttctatttctattttctgaatttatcttattcataaattatttgttattccaaactttaattaatctcgtcatgtgttctagattatctcttatttcaatagtctttatttttttattacaaattttaattatttataaattgtattctagttgagctattatttttctatttctattttctgaatttattttattttttatttcgaattttaattaatctcgtattgtgttctatatagactattcttttaatatttattatttttttatttccaaattcaattgtttcaaaattgtattcctacttgaactctctttttttttccaattttggattttatttgattttttattttcaattttaattaatatagtattggtttcttatatggactcttatttcaatattgtttatttttaatttcgaattttagttattttcaaattgtatccctacatgaactcttcttttttttttctaatttaggattaattttatttttattcagaattttaattaatctcgtattgggttcttatatggactcttctttcaatattccttatttttaattccgaatttctgttatttttaaattgtattcctacttggactcttctttcttttctaatttcgcattttattttatttttattccgaattttgattaatctcttattgggttattatatggattcttctttcaatattacttatttttaattccgaatttcagctatttttaaattgtatttctatttggactcttcttttctttttctccgattaatgtgggaatttctagcccctacaacggacttggtgccttatttcaaggttgttttaataatatagtagataaatagatatgtaggttgtatgacaaattggtctcttgtatatgccaaagagaaaacaggagcaaaatctgtcgacttttagtagacaggtaaaaagaaaaaaaaaagacgtcatccatagcaaataggatgacagtgggtggcagcgaccgctaaccctgtgggagctttgttcagcacatagcttagcccgttttgttttccttgcctaccttctgctttggagttcagctcttagtttagttctcctttgttgttagtgtatttccctagctcctctccctgccaccccagtagccattgaggcgcaccacagttgtattaatcttcgtctaatatattgacatgcaaagctattgcatgttcacaaaaaaaaaaagccatgaaactgtaattaatattggatgtgtgtaactacaataatctggcataccaattttatatcccagtcattctgctgtcctcaatattgcctttacgcgatcttacccttggaattgtttttaaagaaacccattgaccaaaaaaatcatagaaaacaatacaaaggctgcagcgaatgatcaacacaaaatctagtcttatcaccccaagattaacaatatgattcctattacacacaatacatctaactaaactataattcacaagatctatagaaaagaatcagaaagctgcaggacatcgccaacagaaaatagtctttgggctttatagttagtttgtggttgctattcctgtgcttagggatctagtcggttaggagaatctttgctgatcccagtaacattttctttcacgtctctaatttaaacacctctaactaactccttcgatccaattgagaaaagccaatgcagtgcccaacggagcctcaaacatcattttttttattcagctatgaacaatcagtacatctaactcactcataataaactactatgcttaatttgcttgcaaaagtgcaattgtagaggcacaaagtgatgttttgttgagcagatttaaagtttgaagtttgcagcaatatatgcacacatctgctaactttcaagaaaagaaaacaaatccagaggttaagcctgggcgaattgtcagtacctgttgcatttgctgttgctggctttgctgctgctgttgttgctggctctgctgctgctgctgttcctgcggttgctgggaagatgtctgttgtacctgaataacttgcaggtacagtcagatggttgaacactagagacaatgaaaacacaaacagaagtgcgcttccaaaaataaaccaacctttatgagatactcttggtctgacctaactttgggtgaactggattgcattggggaactaatacacccatcagttccagcaggctgtccatccttaccattcaagccacccctggttagtgctgtatatctccggggatccaaatccccatagttacttgagttgctaagattgccttgtgcttgggcctgtgctaagaattgttgctgctgctgtggtgacataagttgaaactgtgactgtgttgaaagaaatggcttctgcatttgagcacctaaatttggtcgcaattggtcaattccctgtaggatggcagcactggcattaattggtgattagatagtaataaaaacatgaagaaaggggacaatagataaatgaacttacagttaatggccaccctttcaatggtagaccgcttactccttggtttagtcctgttaacagcagaagaagaaatttcaacaattgacaaacaaaaaggacatccaaaaaatcagaacaaacaaaacgagaacaggatggttttctacattgagaacaacaacatttgctttttagactagaaatatatccatgcaatattcaccacaaaagccaaccagaaacagcataataattaattcagtacttgtttaatatccatttgttttggcaatttatatttactattcgcaaccttagatgttactgttattacaagaatgacagactagtaaatcgattgttgttagagaaggcaagtaactccacattattgcagtttcactttagcaacaaaagtgacctcacaatatacataggaaaggactaacctgcaccgcccaatccaggttttggctgaataataccctgtccatataaggatgatgggtccatgggcaaagatctttgggcaacacccatattaccttcactttttatatcctgttggaaagaacatctatctttttacttttacattttaatggagcaaacaaaatgacacaagatgagcacaagaagcaacaactcaccatagtttgttgattcctagactggatttgttgcagcgttgtagacacatttccgggagttccgggaactaattgcctatgagattaagatatatgattagtgatcatgccagtaacatatcaaaattcaatttctcccatctctctcttatataaaagcttatcaaaaactaaaagagaatcaccctgcatgatttgttgcagctgacttgagaagagccatcctactagcatcaagaagctgtgatccctcagagtccaaggattgagggtgcttcaagcgctcttcatacatcttggcagccaaaacactagctgttgaatgccccagaatgccatcagaatttagggtgtttattggaccattaagtgaaggatgacttgcattagttcgctgcagttgagcatgtctgtgttgtattagttgcaactgctgcatctgcatctgctgttggtgctctctcgctttgatttgctgtgcctatgtttccgacagaaatacacgtggatcagatcaagagtaatagatgcatggcgacttaaaaaattcccaggatacctctaggtatgccgctgcaacctcagaatgcttctcatttgttcttgcaataaatatatcccaaaaaacagaccaccactcaaagagaaaccctccaggagcatcaattgctgcatgagaagaatttacaatcatgattcttgaacaggtaaaaggaagggtctctaccaggaaaccacatgcagaacttcttggagtggatatacgtctagttatttttgcattaacgttaaagatcttctgtaaggaagggtatttggaatctttggagatatactctgcccagcaaggcaaaaaaactcacctacccctttctttcttttttttgactaaatcaccagggggagagcttccccacctgaattttgtcattgcaaacatttagaaggtttacacagagaattacataagatttagaattcgtagaggggaagagaaaattcctttccacaaggaaactacagttctatcttcagcgtttagaatttccgcccacagggctgcctcgcttatacaccgtcgacctacccctttctaacttgccaggtttcagtaatcaagaagttgatttgggacttaaaagtgatggtatcatttctcaaagtgttagggatcttagcggtcgcaatatgtcatccacatagaagagctgaagaaccatttaggacgggaaaaccaattagagtcaaacattatggaaggatgagacatgacacgttatcactcggataatgcccacaaagacagaaggttaccaattagccgtttctcatatgacaggttttagcaaggaagaaattcatttcaaagttaaaaagggcaatgccacagttttgcattccatttaccaagtttagttcaattcctgtgtttgacaatgtgttccagtccagtttgctggtatcactaatagtacctactgcgatacgcagaactataaaggaactcccttcgtcccaaaatatagcaacctaaagccggattagacatatcttagtactacgaatctagacaggccccacaacacacaaattgcaacagcacggttttgcactgaatatactaagtttagttcaattccacattaatggttcattagtggctataaatgtcaagatacattgtgctagatatatgaacacaaccgcaaccaaataagcaatgtagcttcccgccttctcctttgcatgtactgcaaatccatatatagcacccatgtacttatccactacaaatgctaccattatcagtcaatgtaacattgcattcaggatatcgaattgattatgcttcaattcaactaaataatctcaacaaatgaaatcactgcaaaaatagaaatagttacacaatgcacggcaaaaacaaataattgccaccttcctcaaaacccagcatgcttgagagcatgaaaaaagcgatcaacacaatcacgccatcctctcatccacttgataacaataggtcgatttacatagctagcagaatacatacagtggaaattataccatgtacacaagtagcctcaagtctgccatctcaggataaataaataaataaataaacgagcctctccaagttactatcaacaaatttcaaaatatcctcctattttagcttgaatctctgcctatcctcagcttccatacctaaattttgccccaaaatctgcaaacctcttccaattttccgagttctctgttctaatttggctgaaaattactccctgaataaaataaaattcaaatttccttcatcattttagcactagaaggccctccccttccagttcgaaacccagaattcgccctggttaatctcaaaactctgacactccacataaaacctcaaatcaccgtaaccacaaacttactttggagattgaaacgagagaaaaacccggcaaaaaaacaaaaggggcagcaactagagaagcagcggatatgagatgattaccgactggatcagcggcgacctttccctccgccatgaaagccttggccgtcgactgcaagttcctcttcagcagatagtcatagatatacacatcaagcctgcacaaccagcacgggaaggaaggaattaaccccaaacaacaaaaacagtcacccaaaaaacgcatccaagtagtagcttacatcttatctgcttcccagttgctctgcgccatctgcaagcaaaaacagattaaaccgaccagaaccaaacgcggcagaaatcagcaacgaatcgagccccaaattcgcgtgaaacgaagggatcagagcccacattaccgattgggcgcgatcccgcgactcaggggatgccgagaaaccccgcaaaaataaaatccgctacgaacgaacaccggtggtggaaggatccaatgcccgatcggcggcggcgagctcgggcacggggtcccgaaggggaggaggaggaggagccgggcggttggcgtacgagagagcgcgccgctactccgagctcgccgctagctttgcttgagaagaagcgaggaggagatgagagaaagagagagagagatggaaggggaggaaagggaaggggaggagagagaaagcgagcgaagggagggagggagggagaggaagagagggagccagatgaggcaaggcatggggtgtacgtgggttttgagtgcggcttggttcttacagtggtgaacccggttcgggaaggttcggatggcagacggccgcacgcatttttgcgcaatggttcatggacaataatgtgccaattatcattcgcacccgtttacatgggtgttcagattgatatcattttaaatcatattatttttttataaagttgtcaaaaatatatatgcatttagtttttttctaaactttgataaatatataagaaatcatatcaaatttttggtaatattgccaacttaccattataatatgaataacccctatatctcgcactggtttatatctaaaggtctgtttagattgtagctaaaataaaccttacaaaaattttagcaatttagcaatattaccaagttttgacaggatttcttttgtatttactagagtttggtaaaaaaactaaatagatacacatgtttggcaactttactggtatggttcgaaatggtatcaatccgaacaacttctaaatactactccctccatctagttttgataggcgtatttttaaatctgaaaattttatttttaataggcatatttcaatccaacaacctatcatcttaatgactttctcaaatttaatgtgtgactctccattcttccacacaagattggctgtatgggcatcgagaaatgtaaatactaatgaatcacttgtctacgaggaaatattagtagcatgtttaaatagatgataagtagaattacttattcttgatctgtgtgccaagatgaaatatgactatcaaaagtagatggagggagtacttcctccattccaaaataattgtagtagacgtgtagttcaaatttgaattacatggatgcatttattatttttggacggagagaactatgactttaatggctcgacaatggattaatgaacttcaatgttagtcatatcttaatatggccaaagttatgcttacattatagtattgcgttttctgccttaaaatatatgcagtttttagctatgaactatatatgttgctatattttaggatggatgttgtatttaacaacttttagttgttttttttaattgaaacaagtttggttatctgcggttcacacccttaattattctcgttaaatgttgcctacgaatcatctatgagacccccgttaccagctaagattagaaggaaaatgtccataatatacaggagtagtatttataggttccggaaaacattatatatctttccatgaaacatatgatcacgcctttcttttgctactataaatattgccatattcaatctatcactttatggaagtttattttagccttattagctacaaactcaaagtttcctagttttaaatagttcttttaaagccataaagccaatctaacactaataactaatagctaaagctagattaaaaaactttttttgcgacgaaggtacttttgaagtgtttgtatcttaaaggcatgactctatcctttaacatatgtgactaaaaaaccatatgttcatagactaccaaagtttaaaaactaatttaaaaggtataaccaataagtataacctagaataagcatcgccgtatactagatcattctaatgtgggattctccgtgctatcggctactactctcaaatactagcattcaaacaatccatgactttcactctaattcgtgatatcatactataatatggatttctgtatctctatctctatctctatctcttctctatctctattattataaaaattgaatatatttttgtcagcactttggtacgtcatttgtgtatgagttgatttgtaagtttgatcgcttttggaaatacaaaaagagctgtataagaaatctctttaaaaaaaactcatatactaacttaatagtctatttaatagccaatttataaaatagttactccatccgcctcaaaatagttgtcgctttggagttcaaattttgtcccacaatacttgtcacttgttagtattacttgtcacatcaatcacctccaattcaattttttacccattctatcctcaccactctcgtgcttctattcaaataaggggcaatatagtctttacttctcaaaccttaatttgtgttaaacaacctagaaagataagtattgtgggacagagaaaatacttataacatatagtacacagttaatacttggtctcacttatcatacacacatgtatcttagagcccgtgatgtatatagctggctacggatctgtagcccgctgctattctctctcctttttatcttcttgaaatgtatttatagctggcttatagcttgctattatagctgctctgagagcaagtataatagaaggctgtaagtcagctaaatgctgaggtggaggagagaagagaggagagagagaggagaagtgggctgtaaacttacagccggtttggacacaaaaaccaagaaattatgtgagagagacaagtgggccctatgggctggtttagtttgaggcctaaattaggcttaccaatatttggcaatttcaatagtgtttagtgtctatttggtttgaagccaaattttggcatgtctaagaaaataagccatttcaatagtgaacttaggctgttttggcttcaatccaaatacaactttgccttaccaaaattagtcatgccaaaatttgccaaattttggcattgacaaaatttggtaaggcttatttaggccacaaaccaaaccaaccatatattaattgtaaatagctaattattatatgtgtgggctaagagcagactaaaaaaaaccttatagccaataagtcggctatattattagccttgctataagagcaggtgcaatggcagtctatagccagctgtaaacatattttaatgagataaaagttgagagagaagagcagcgggctacagacatgtagccagctacagcacggacttcaagacgcaatgtgtgtataacgggtgggaccatatattaatagtatagggcatgttcgactgcactcatatggctgtggtgcagtcggccggaacagtgctttgtgtaagcagctgcagcagcaccactgtgttgcagctgctgcacattgcagctgaacaggcccatagtaagcaactattatataaattagctattagattggctataaatgaattgaagctagtagtgggctgtactattaaactttctctaacatccatccatcaggttcggagccggaggtgtagggtcggaggcgcggggattggagcacttgattaggtccggattaccatggtccttgcgctaccccgtgccaaacaccaaacaggggaagtgaccaatccggtatagggactcgctgacgtggcgctaagccattgcatcccggatccgctgctgtgtgtgaggggatttgtgaaagacagaggtcagagggtgaggtggtgattttacacagtgacgatgtctctgacacttgggttcctctgaggttgccttggctgcgtcacaacgtgtggctgtgtgaactgatgcaaacgtgtggagatgacgagtgaaaagaaatataaataataaataatttatgggtaaaatttatatatgtaatgcaaagtagtttaaaagtcaataccgaagaaactaaagttcaaattttgattatcaggttgttgctaataaatccctcttttggcacaactctggatttaagattttttttagctgggtattcatatctctacaaatccataaatttagttatgccattacattgataatatttgaataaattattttttttcattctaaataaaatttaaaagtttagacagctataatttagcatacaaatttcaaaatacttcattcgtcttaaaataaaccaacctaaaatatgatggggtatttgttaacgctaaaatttgataagcctcgaagtcgtcgtcagcctagagtcagtatcagttttagagtcctgaaattggctgatgagaattactagtcgccaacagctggattctcaacggattcagttagaaaaataatcaattaaagaaagcttatccaaaagatgtcgagttcgaagaagatgcggcgtggcaatctatctattaactagacagagttagttagtttccttttgattttagaaaagtgtgtttagtgtccgatcaggacttgtatcttttttgttatctttacgaaacttatatcgtgtccgatcgggactagtatttaccaatggatataaatatgtacacctaggatcattataaattatccctcgatcaatacaactactctctgcgtatcgccaccctcttttctgtgttcttactatatctatatattaacattacatgtacacaatgtggaatatgaaaccgtagattaatgagtgttaaaagccaaagaacaactagatttatttaatcaattaaagataactaatgcatccggtaacattgggaagaacaacatatcagatcaatcacatagaatttataaacaccaaatagtgaaacaactgaagacgcaaaaggaacaacatgacaatgggtgagaaccattaatggggattgtcactcgaccatggatgacggaacagatgtgcaactctacaaaatcatgcacgcgcaggaacaccggaagcgtcacctttcgctaagaatccattgatttccttagccgatgcagctgtctacacacttcttgttggtggcaggatcctccttaaattctttgctacgcccttcattgcacacaacgctgaatttttccatagtgggattttttttctccctcagaggcccaagaagttgcttgtttaaaatgatgcaaatgtctacacaatgcttgttgttggtggcaggatcctccttaaattctttgctacgcccttcattgcacacaacgctgaatttttccatagtgggattttttttctccctcagaggcccaagaagttgcttgtttaagatgatgcagatgtctatacaatgcttgttgtcaatggggtccttttgttccttcttcttacaatcctttgcacaaaaaggtcgaaagaaatcctcccctacagtggctccttcaaccgcaaccaccgccacaagggtggcgaggagcagagccaccgcaatggtcttactcttagcattagcactgtttctattgagcgtaattggtgtggagttgagatgatttccttaccctgaagctcatgttatataaccaccaatgaggctaactatatgcatatatatcatctttggttgttcctcccttatgaccagagagtgatgaggttcttatggcatgcatgctttaaaataattcaaattatgaccagagagtgatgaggttattatggcatgcatgcttttaaatacgcgaaatctatttcgagagcgctctcggtttagctctatagcgcgacgcatctcagagccatctaactgtgcacgtcgtcatgatatccatccacataggtgtctttttcctttcaaataaagttcacgtgggtatctttttcctattcaaataaagtttcctctcaaattacttattcgatctataatccgattacaacattgtgttcgttacaattaaatcttcacaacaagatcttacatgattatgttacgatgaaaaaatatttatatttgtaaattacttttattatatacataagttacttttagatttgactaaattacttcttagacatataaaagtaaattcaataaaagtccaaaagtaatttacatatattttaaaagtaacttaaaacaaaacggaagtaactttgtcacgacattagaagtaaattcgttgtagggataaaaatatgactttttagttaattccataatttgtgctgattaatttaatttctagatagagtcatgtttttatctctacaacggatttacttcaaatgacatgccaaagttaccttcgttttgttgtaagttacttctacagtatatataaattacttttagacttactgaacttacttttatagtttaagaagtaacttagtgaaatctaaaagtaatttatacatatatcataaaagtaatttgtgatttttcatcaaaatataatcatgtgagatcttgttgtaaagatttaattgcaatgaacacaacggcgtaatcggattataaatcggataagtaatttaagagaaacttctctaagaaggaaaaaatatatagatattgagtgtagtagctttttttttttggaaagaatggtgtctctttttagcactatctagctagcactctcggtgtagtcgcgtccttttaaataattcaaataaatagctatgtccttcgttgtatgtgttaaccacttattttcttggattgtaggatgatggatcgtaagaatatgatttctttttacacttctgaccaaaatgagcaaaattgctgcaaattgtgaccaaaatgagcaaaattgctgcaaattgtgcaaattgcagccactttgagctgcttcagccgcagccgatgctaaaaaaggtcccaaacacactataaatacataagaaatcatatcaaaacttagcaatattatcagattatcaaaaatttgacatcgcaaaaattgattatgttggctacaaggccctaaacatcgacaaacaaaagactcgatgaatgaaatcgacaatagtagtatcacagttaacagtctgatcaccagacaccacaaacatgctttgtctattcaataatggagaatgggttatcgttatccatccatcggatagtagacaagagaaagattatcgaatttaagcagaacagtccaggttcacacacagtaacaaacaatcaatacgctacagaaatcaccttctcattcataaagaagttaactactccgtaaaaactcggtaattgcgattgcgacacgcatcatcgcgtcgaatgtatggtggtgtgtgtgtctctctcgtctagctctgctgcatggtggcgttgccgtgccgctccatgacccgccgcatcgccagcgccgccgcctcgctcgcccgcagcgtcccgctcgccatgatcgccgcgaactcccgcatcacctcctcctgcaccttccccctcgcgccgccgagcgggtcagccgccgagccctgcttcgctttggccgccttgtcttcttgcttcgaggaagacgagccctcgccgggcttgttctgcggcggcggcggcggcggcacggacgaggggacgaactgcgtggcctgcggcgcggcgttggtccggagcgtggactcgaggttctgaatcatgggcatgatgagggggcccatggggctggacatgacctcggcggggaggttgaggatgtagtcggggatgccggcgccgacgaggaattgcgccacctcgttgctgaagttgttgcagttgtggctgagcagccggtacgtctccgccgtgtaccgcggcgagatgtcgcggaggtagtcctcgaacacctcccgcgggatgtgcgtctcgcccatctccaccacccgcaccggccgcccgtacggcgtcctccccgccgccagcgactggatcccgccgccgaagaagtactcgttcccgtacaccaccacgcccgtatgcctacccaacaaatcaaatccgatttaatttagcccaaacccaaatccaaaaatccaccagattaagccgccagatctgattcactcaccagatggcctcgattggcttgccgaggaaggaggtggagagctgccgcgcgaggccgttgctgaggtcgtacacgttaagaacaaccttgtacccttcctgccacaccatcaacacccaaatccctctccgccattagcgattgttacaggagcagcagccaatgaagaggacgagttcaggtaggggaccgacgagccttacctccgccattagcacgcggcagaaatcttagcagcagaagtagttcggatttcgcagcacgaacacgccgaatctccgggagaagacgaacaaaagcaaccgcaagtccgcaacacgcgtggatctggaccaaaggcggaacggaggcgggcgagacgagggagaaatataaagaaataacaaggtgattatatgagtaatcaaaaagaattaatggaggaagcttctggagccgtgtgctcctccgggtggggagaagggagacggaaacggaggcgtgcgggttttcgtggccgtccgatcgggggatagggggtgacgtggcgacggatggaggcaggtgcgaggccgctttcgttgaaaattccaagcgcgtcgcggagtgacgggaatcttctagaaggggagtggctcgggtaccggacgcgtggttggttgggaatcggttgcgtccggctcagctggcagctgggtcctcgagtgtttgaggcagcttcgacttccgaataaacgtgctttttttatacgactttcgaatttgttctagcatcagcatgaatgcatgatggcgtcctctcgtctctggctctctctggacttctgcagacatgcggaatttttttaagccgttttatcccacttctgttttgtttttcttctaaaatgtatattagaaataagctttgcaagcagaatttatgtgagtagtgagggagccatcatattcgcggaataagcgaaacgacatatttgcaaacgaaaagtaatttgcgaataaaacttttatatacgtgttcttagtgatctaaaaataaaggctagaaaataaatttcgataaaaacaaacctcaaaatcagtttcaaatttaaggttaaaaaaatcaaattttggttgataagcataagaataaatgaaaagatgaggccctaagattgctcacttagaggcggttcagtttactaccattttcaaccacaccaaactttaggattgtgaagcaatctaaacacatctcaaatactccacaatatcttaccatgtcaaaattcggtgattttctgaaaacttcttcacacaacggtatgtatatatatatatatatatatatatatatatatatatatatatatatatatatatatatatatatatatatatatatatggatatttggtatgataacaaactataaacaacatccatatacttctatcttaccaaaatttagcattggccctgatcggaagtgctggttgcagcagctgcagccagtcagccccaatccaaaccaaagagctgcagcagccagcacaaccgatcaagcccattatcgaattttgccaaattttagaattatcaaaatttgttaatgttaattttggtatgaacaaaccctgcttcctacattcacacaacttagccaaacagatatactccactcttctccggctacttaaaaacaatctcagcctctcagggaagagggaacacatgcgctccaaaaaagcaactgttaaatgatttttatcgaaataaacggtgtaaatcgtgaagaggaaaagaaaatatagtttaccccatgcactgaagttcactgatttaaaatccataacaaccgtgagtacgtagtgaagtttatcgatcactcaggcaggcatgtcaccaatgaatcgccatgcatcagtataggagagcagtatgcatctttaaggggaaacgaaatcaggtaagaagttttcttttaatcagcattggtagactttccccagaccgtgaatcaagagaactttatttgtccaaacattaacatttactcgtaatatatatacatctttgcggttcatggtcatggggccttcacaatattggaaagatacttctacaactgacatccactatggatctgttagaaacacaaactatacagtcctaaaaatatcgtaatctccatcttcagcccaaaaataaatcagattaaaaacaatgtatagcttcaatcagtatccatcagcttatcttcaaaaagagaaaaagaaaacagaatatatcaactactagccaagatgataatcatgatgactataagagcaacaatacatgctcacctgtttctgactggaccctttttttgtccttggttcagtccaactgaataatatcataaccataaaaatgatccaaaagaattctgcaccacaatacagcagtacaagttagagccttagaataccgtaaaacaccaaacgtcattaaattgaagggcacatacttcagagatattgttgcaggaggttagtcgacgaatttttcagcttgcaactcattcctagatggacatcaccaaaagtgtacctggcatatggtcaccataaaattcaatgttaatgaaaaaggataatagcaagaaaaagggaatgaaagatgagttgcagacctgtattcacagtgttctggaaagccacatcgagcttttgcatagtcccagtgacaatcgtcatttctcaatggacctcggaaagctgttcatgcacctctgttagtggctttgaaagtcaaatcagatgcagggggattcatatatctggtaataggagttgaaactgagcacacctttcgtcacaaattttgatttcgcatcagggtgcatgtcatgccacatttcaagccacaactcacgcatcagtactggcatcctaacaatgttcctgtgatttgctgttaaaataataattttcaaaatgagtgttgtatagcaaaggaatgattaaactttagagggggttgcatgttaaatctggagtatgtgggcacacgcacaagtactccgcctgaatcactgtaaatatatgtatattctaagcataaacttctacatggatttcttattcccttgtagcaaagaaatgcataaagctggcataaggacaaacattacgacataaatatgaaaaaaatggagaaaaaacaactaaaagatttgcacccacctttatcaagctcccagacggctgttctccatcccggaatgctctcagcatcttcaaagtaggttatgtacttcacatgtggagtcctcgtcatgtttgggagtatgccctggcctacatggtggtcgacattcatctttgtttgtaaatcagatccatcatgttctgcctgcaaaaacagtaggatgtacaaagcaggaaaggcacattaacattgtgatatgctacaaggaaacagtcaataattctattagccacaacaaaacaaattaataaacaggcctcaaactcctctgctgaggatcatatcactaggcacatggtaaaatacctgcggagccctagttatgttcacttttggcccaagccagttcttgcaccatgagagagaattgtaggatacctgccacaaagtcttgtttgttcaactcaagacattgaattgacctataaagatactacagtagaacataccgttccgtctccgctggaattgttgggctttccagtaacagaattacctgatctggaaagaataaattgtgttactattttattctaaaacaaaagacataaaaatgtggccagataaacagttgtccaaaccagaattgaactcatcaaaagccaaaggttcaaaggtcagtatttttcgagaaaacaaatgcacgaaaagctattatctgtggtaattaccattagaaaccagtgcaacttactaggatcttcattcaatcaaattagccatgaaaaatgagtctgcgaactacaaatatcttttcatattaaagcaaaaaaaaatactgttccaggaaactacactagaagcagacatacataaagacagataatggataatttgaaagaattggacacgagactttccaacacaagatgcatgatacctgccttgatagtagagacccttcaaattcataaataatatcagttattatccagttatctggatatggttttccactcggtgcaaaataatagcctacctgcttaacaaaaaaggccataaatcggtgaatggtaatgtggttcaaagcaggctaaagtagaaactttaacaatcaaagaaaaatcccaatcatacctcagtctttgaatcaagcccatatatgcagaacacattctttattgggggtctctcccagggtgtgaggggattaagaactggatcaccctggtagtacctgagatcaacaaagatcaaaatgtgggggtattagatacaatttaatcaaaatcacacatatttacttccataagcatataaaaacatgtaagttggtggtttactttgaagataaatatgtatgtgaaactgagaattacaatttacaaagtagcagcactggcgcatacaaaattgcaaactcacttctcaagctgatggataagccctatgctctgagggtcccaatcctttatggttttaaacagagtaccatctgaaacctccctagcagaaaatgacaaaagagttggctttccacactccatgctggatgttatgttctcagttgtatccataatggatgggtatgcttccgtatctgccagaggaaaacagaaaatgaaagaaaagaaaaggtagacctgctcagtggaagcaaaatcttaatcatagattaaagctgggaagaaatttcaacaaagaacctcgaactgtaggaacctcgatgctgacaaggtttgtgggccatcctgagtattcagacttatattccatttcatcacattgctgtctgtggtggcaacctccctttccctcaaagaaatgcttccagtatatattatcagctttgcaatattctgagaagggcatgagccataaagatgaaccaaatgcattaaacatcaatcgtgctgttccctgaaaacaataaaagcaattttagatgcataagagacaatataattataagatggcatataatgtaacaattttggcaatatatagctaagtacagattcaacacatgtgtatcactcgaaggtagagaatttatacatgcaccaaaacaacctccctaactgactctaaaactagcatggttgtggcacacaacctggccgtgcgaatcggctatgagaagtaaggcattgttgtctccaagactccaacagtactaaaaggttcccttgcacgtgtagaagggctgagaggttaccagaacagtactctcagaaagggcagggacaaagaacaaggggcaaaagaatcaccacaaaacctagtgaatccaaaaaggaaataaaaactattcagtattggacaaccaacaacatacttaaattcaacactaacaatgttggaggaaaaatgtataaatatcagaaatatagcctcctgagggcagaggacacattattgaaaaatatataattcataaaggctgacctcgctgactggaagaccaaatgttgctccagaaagagcagctttaactgcttcagtagaaccaagaagaggtgcacctgaaagcaaggaaaaatggcatgacactaacaaataacgatggtgatgaattaaattccttctggtttacataccaactgcaaagtatgcatgtatatgttcgtcaagccatcggatgtaatgcttgggagcgatttctagtttcaaccattccagaaagtagcgaaacacattattacccatggaatgagcaaacactaaagaaggccctcctcgaagtttcaatgcagtttcaaaagttaacctgcagttaaaaggactatgagcaccaaaatactatctttccgcatgcaacaatgaatttccgacatatcgccgtgtcattatcaagtattgtataaacttgaagaaaacaacttttaattcaagtgaaaaggatgtcataaaaaaatgaaaagaagcaagtaaaagcttatcaatttcccccgcaaaaaaaattatcaatttcagcttgcatgcacaccaaaggcaaccaaacctttgtatttctgatactagtactacttagttatgcgtgattttttgagggtatggaaggtaaacaaagtgagtatattctggttgatacaatttagaagtgtttttacaccaattattagtaataacatcaaatactatcgaaagccaatgggcagtgagtaaattgattgctatgtgatatgaagtgaagtgttacaaactttaatttatggaagtacagatccctctcctcaagcatcgaagggggcagcctccaatcgtatggaaccgcgataatggcattagcttcaataccaaattctacacaccatttgacccattctttccacactgaagaaagaggacctgaaaacttggccaataaaaccaaattagtaagaaagattttttttatggctaatcatttttttattctttgaggaacgagatggggaattctacagcttaccgatgaacatgaatttgcaatgtaacctagctaatgctattattctcatggcaatatccattattaactcacaaaagcttgatgtcaaattttatcactctcacttgccatcgatggttttttttttccattgcatgggagttgaagcataaatcacaatctatcacattgctgatgaatcgtgcagcatatttgtactcaaaattcaataatccaatcaataccaaggagaattaagcgaggcatataatttaccagttatataaccagggtctaactctgtaattgcagaaagaccactgtcaggccttgacttgcactctggatgatccgtctggttgtaagggtcgagcagcatgcatttgagccagcaattgacagcagataagagctgcaccatgaacccgattaagtcgcaagtatgaaaatgaaagataatacttaaatatgaccccctacatgtaacaaatataatcgttacagcctgttcattgcacagattgaatgcttctgtaacaacctcacccaattaagccgtatgacgccttacaggaaacagtcccaaccatcacacaattaacaaatatcccttttccagtgaagtaatgacaaacctcttctaactgaacgtgtcactagttttagcatggttacgtagtacacacaaccgatttagtcctaaaaacacttccaaaacctataactagatggtcactcaaatcaagcagatgtgcagtcgcacacacgcatctgcctgatgggccattgcaaaattactttaatccatcaatgcctcacaagaacagaccaacgaatcctaataaaagaacaaaagcacatatattatccagaacaacaacagttactagcaaaagtagctttctgaatatcaggaggacagtacggaacgaggggtggttctgaccttggcggtgtcgagccagacggagtcgagggggttgaagtcgaagggcgagtaggggcaatccagcacagaccacgcgcgcagctgcgtcgacgcgaacccggggattattatccccgagagcttccggtagtcgaaatccgcgccgccatcgcctccgcccaccgcccccacggccgccaccgccaccgccgccaccgccaccgccaccgccaccgaacaggcgaggtccccgcgccggagccgccgccgaggcatcgcgaagaactgacgcgatctgacgagcgattcaggagaggtaggagctggatgtgtccagcgcgtgcttccaagggggaggtcgtggatcgatctggaccgtccgtgtcgcacgggacaggtcagatctcttgcaaacggacggtcggaaatcggccgcgtgtgctcccctccctaaggtggaggtcgtgtcgttcaactccgaccgaagggaggaacgggaggaacgggagtcgaggccgagacgctgtctgtctatcggttccatttttttttcttaaaaaaaagattcattttactcctttaaaatattttattggttcattttacacattaactattgaaaacggatcaccatacttcctaacgatatttctttttctctctctatataagtcatattatacaatgaaattgataggattgagcactgagcatgatttaaacattaaggttttagattttaaacaaatagcgtatgttcagattcaaattcagaacagaattcattttacaacagagggagaagaacaagatacatgagttgcagtagtgcgtcgagcataattcagtagggtatatccagttttgcacagaagcccatctagaataggcaagttatactttagatcaacattctgcagaaaaaatctacaaagagaataaaaaggtaatcgggtcattctcctttgtttgcctacgacgctgataataaatgctttgatcttgattttggcggggcttaaaacaaggcgagctgcaacaggtagagcctattcatgaaccctgaagggacctctcgtatacgaaggttgaggcactagcaaacaatttgatcctcggccacaccaccgaagattttcgccaaatttctttcgcaagatcaacccaacaacaaccattgcaagaaaaacggttagatccaaaccactaatgaaagagagaataaacattgtgaactgcaaagaaaaccagcgaccatacccaaaaggggcctccttgcaagagaggttgagatcatctcgactagattcaaccacatcagccacatcttaaggaagcttcgccggatattaggaaaaggaccgcttctcttgaatggagctagaagctctataatcaaccgtgcttgtgacgatgaatggtggatatatacatcgataatcagccgctaccccgctacaagtacaatcgtagcgataaaactgtaggaaagtactcattacagtagcaagtgggaaacagagagtatctccaaattaatcatgctcaaatttaagttatgctcaaacaatagattatgacaccggcagagaattaacaatacagcttgggattttatagctggatattaatctggccccatcataacacacacggagatactcctatatatcaaccgagcgaagaagcacacacaagatcacacaatcaggccaggttgcttcgatccggccaccggccggtcacagcccgccacggccatcatgggtgatgccggggtggtggtggtcgtcgtatggccggaatccccgtgccagcgccgcgctccacgccttctgcacgccggtgaccctgccgccgcactcgtgcccgtcccacttctccagcgcgtgaacgatccccgccgcccgccacgcgctcatcaccctcctcggcaaccaattctgcgtgcatatgtgttcagattcatagctaaagataactatattctgagacggacgaagtaagtggtacagagggagtacctcgcaaacgtgaaggttttcgaaggattcagggacgagtagagccggggtgcagtggtagacgcagtcgttgcgggccttgttgggagggaactgcgagtacggcacgaaatgggatcctttctgggctttcatctgctcctcatccgtcaccccgtcgcccacgagccacacctgcatacgcacgcagtttcgatttatttcatccacgccacaacgtccagttacccacaatgaccctgtttggatccttcggactattaaatagcgctctgaaatcttgctatttaggattattaaacgtagattatcgacaaaaccgattctataacccttagcctattttgtgagacgaatctaatgatatatattaatccataattagcggctgattactgtagcattactgtagcaaatcatggattaatatatctcgttagattcgtctcgcaaaatagcctaggagttatggaatgagttttgtcagtaatctacgtttaatactcttaaatagcaaaatcctgaagggctatttaatagcccttcggatccaaacagagccaattttcaattaccttgctgctgtaactgcatgacaaaaccagatgctcctgcatttcaggctgcagctgctgcttcaggcattcatacagctccttatttaccatcctcacctgtttttttgttcgaaattagttacagccagtaacctttttaatcaccgtgatcgatactgttaagaatattaactggtcgagtactgtcattttggtattatacctggatctcccgcttgcagagggacagggtaagaacgagagagatcttgttcgcgtttcccaggaggagcacatctttggtgccctgagggatcatgttgagaacggcagcaacagcgaggcttgttccatcgacgatcttcgtcttcaggcttggcttcctgacgacatataactccccgttcctgttcagatcgtacccctgcacgtacaattggatcgatttaattagcatcgcctgacatatacccgtgcaggaccaaagcagatttatggggcgaacatttgctaaacactgttcctttttcttgaagtaaaaagtgccactgtcatatgaacctctggctgctgaaatttattactccatccattccaaaatggtgtataagcatttatgcacgttttcaactgatgtccagatatattttgagaaacatgaaaaaaaaattcttatactgtctgatgctagtaaggctgtgtttagttctttctaaagttgaaagtttgagttaaaattggtacaatatgactgaaaaattatatatatacgacaggttaatgtgatggaaaaagttggaagtttgaatctaaacacagcctaataaattttgtaaatcttggtaggtgaattcggtcccatgtaactacttggggagctagtgcagagaggaaagagtgatgctacgaagttgcacctactgctggtactgttacattaaagccggcgaacagtgagaaggcatgcaatgaattggatctgtcaggtgggtcagcgaatgcatttacctggttgaggaggccgagcgtgaggactctcgcgccacttgcttctgcgtctgacaccgctttctctatcaaacggctgaccttgtacccatcactcttcgacgtatactgcgattccatcaatgcacgcaattaattcactatttcctcatacacaaaaacaaacattccaaactatacgtatattttgtacgagaaaaaaatacttaaagaaatggagattttgtatgagtatattttgtatttaaaaattagtcaaaattacgtacgtgggaggtgaaccttgggatgacccaggtctcgatgttgagcttgtcgaggcggttggcctccgacctgaaggtggaggcgaagagggagaggagaggggaggcgacggcggaggcggcacggaggaggtggccggaggctgcggcgccaagcgggttggacgcgacggcggcgaagccgaggcggttgtggaagacggactccggcgtggtgaggtgcgtgaggtgcaccacgtccggccgccacgccgcctcgtccctcccctgcagcgtcctctcgtacagctcgtcgcttgacttgtccgtcgtcccgtagatgtagtcgtacaccggcatgaacagcgagtagttcgtcctgaactgcgtgtggtgcaacgaatgaaacctacatacatacatacactaattaatgatctctattagcagttaattagtataattaattattactcatatttctcactgtacactttttcatataaagtattttcatgtaaaagttctccaatataagttttttgaatgaaagttttcagaaagaaaaaaaggtgtactaaaataaccaacattgcgctaaatagcaatcccgttaaattgtaatggtatatttttaaacaggtaaatttatacgtacgatggggtgtagaggagatatttgagaggggggaagacgtggaagaggcacttggggacgagctcgaagttgcagtggccgaggtagttcatgaagtcgatgtagacgaggtagccgttggccgtgacgacagagacggtgccggtggcgacggtgctgaggatggggatggcgaggaggacgaagtagacgacctcctcggcgaaggggtggatgacggaggtgatgggctcagtgacgatggaggcgtggtggtgcgagtggtaccgcgcgtacagccagtggtggtgcagcgccctgtgcagccagtagtagaggaactccactggccccgcgtgcagcaccgccgtcaccaccatcccctttgtgctccaccacggtgccacctgcgcctgcggcatcgtcgcgctcaccaagtagaacaccagcgccgtcaggattatctggtcatccctgcatccatatatgtaaatatgaaaacccaaaaaacttagagatatgctctagtctaacgaaaagtatctcgaggtgtcgtttctgatgattggatctaatattgtccatcctgtccagtttgattcaacgaacaaaaacgatttagtactgtgatataccgttaccttaaggtacttttcgctagactgaagcaaaatctcaaaagatgtaacacccgaaattttcatttcaccgactaaacagtcccttagacgtacactcaatttgatcgattaattaccagtttctttccctgtcgatttgttcgaagtcgaggctcttgttgacgatcttgtgcttgctccgggcagtctggtggcgggagacggtgatccagagctggccgtagagcagacggaggagcagcatggggaacaccatgaagttgaggaggtctcgctccgccgcgctgctcgccgtcacgaacctgtacgtgctgtacgccgccgacggcgccaccagcgcgtactgtagatttccacgtacgcaacagtcgttaattactcacattgttgcaatcagcttacaaacaacgtatggcatcaaatcaaatctgatgatgacgataaaacataatttagtaccttgtagtttccaaggttatgccacggccactgagtgagaggccctggcttagaggccatgatagctagctgtgtgtggtttggttgcaggtgcgagaccggtcgagctgataccgggcacgcacttgagattgacagtagagaggagatggctgtgggagtggagtgtactcgttagctttatataggccgagctgagagagtggaaatccattgatcagggccggatcaaaagacgatagctagcttttactcctgtcgtccaacccagcgacgctggttgatattttgattggatattttattttttagaaaatcatgagcttaaaataggagtccgcatgcgggtccatctaaaatctcttactataacagtatcagttaggtggtgtttgaatcctccggagatgaagataaaaataaaaattaagtgttttatattctattctcatatattgttatacattgccattttgttctcccatattgcctacatgcgtatatagaactatagaccaaattaattacctgtagaagaactctttttagatgactgcagaagagaactcttaactaatttaatattatctaaaacatattatcaaaatatattcaatgttagatttaataaaactaatttaatattttagatgttgctatatttttctataaactttatcaaacttaacaaaatttgtctacgaaaaaagtcaaacatcttatcacatgaaacatagagagtatatataataaatgggtcctactaaattttggcttctcctatccatgctacattgttccacccaaacaaaaagttgaatcatcatatgcgtacaaaccaaatgaaaaaaaaaatattaaatcactatattcaacaaaatatggatgagcatatctcatccatatatgatcgtgaaccaaacacaccctaggtttgtattagccgttaggagtagtcccatactcacggatgaggcgataacaacatgcatggttatcgtattgaaagggcaaatcgatgtaccctgagagaccacgacgttccctttttgatgctaactaatactacctccatctcaaaatgtttaacgccgttgacttttttaaaaatctttgaccgtttgtcttattcaaaaaatgtaagtaattgttaattcttttcctatcatttgatttattgttaaatatacttttatttatacatatagttttacacatttcacaaaagtttttgaataagacgaacggtcaaatatttttaaaaaaattaacgacgtcaaatatttagggaagtagggagtatatttgtacgtagtggtcgggtgtacatagcagtcgtagtaggtcgaaggtggttgggatgttgaaagctacagcatgcatgctccggtctattctgcggacggccggtacacatcttgagcgcattgaaggggaattcgagctggaattacagtgcttttctgtacgtgtctgctagcgatgagagctactcctacctgtggctgagagttgctctctctgcctcctgccagcagacttgattgcgagcatccatgcctaggaccattgctccaccaacaaatccgtttgccgtatttgtgtgactagtacgtagacacttttctctcccatttttgatagctaaaacatatcgataattgtaagttcataataaaagcgaaaaaccatttaagagtttgaataatcttgagcacacgcacgttcttaagaaacgataagcaaataaacgataaaaaccactagatcaatcacaaagatatgagatttaacgtggaaaacccacctaaaacagaagagaaaaaaaccaagggcactagccagcaaaatatcttcactatattaaggtgaggttataacgccgaacagtgacttacaaaaggtatatatgaagatgaaaccctaaagaataacgattcgtaccagctggcctcaacacacatgtttacgcatacacagattgtatctccaaaccattaacatgaaattcccgagttgtatccgtgctcacgagtaggcgggcgcgtggccgcgtgggagtagtagttgtgtgcatgtgcgttttacatttaatcgtaaagaaaattttcaaaacaaatatatactccctccgtattttaatgtataacgtcgttgacttttcgaccaacgtttgaccattcgttttattcaaaacttttatgtaaatataaaaatttttatgtcattcttaaagaacattaatgacgaatcaagtcatataataaaataaatgataattacataaattttttgaataagacgaatggttaaacgttggataaaaaaccaacagcgtcatatattaaaatatagagttagtataatatagtaacatagtaataaaacaagtcccaaaacatcacttattcatgaccggaaagagtgagattgtgccatatattctcaaaaaagaaagtaaggcacagtcaaattcgattaaaatatagaggaatgaaatcaggctactttcttttttttcttcttctttatgttggtcccatttaatcttatatgtctccctttgttcccactttttgcatcaatgagtgctcactttcagactttggccactaacattttttttattaatacacattgcaaatgcaacatgcactgtattattaaagtacatgcaagataagttaataaaatgatacaatttttttaatcataatcgagcaatttagtaaaaaaaaaatactgttcagagttaaaactgtgatggtaaataatgctgcagtcagctgtgtaaatgggaacagaggaagtagtagtaatctattttttgaaaagaatatcttcttattcagaccgaacgtaggaaatgaagacagatgcatgcgctggagagtttaaaatccatttcaactttgtcgtggtaatttatatgcccctgggaggctgggaggatatttttgtgacccttttgcgtgcacacattcaaggagcagtgcaaaatgtgggtcaccagaccagctgcatgcctgctaccttcctttcctggtctaacggcccaaattaaagcatacgttgaaagaaacacatcgttcgaatgatcatcgatctgttactactaagcacgctataaactgcatgcgtaatactattacttgcttcaattcgtttggctttgcctttgcaagtgaaaaatcataccagtcaccacagaactgaggtagcaacagttgctgccgctaaaagctgaaaatatgcagctcagctagctctacatatctcgttataatccaggaaagggtggactaatgtatagtgtatacacgctcttgcacatagttctccttaatttcagacacccaccccccacacacaaaagtattcctagatgcattatattccgatgcagttcttgctaataatgcctttacctactcacctcccgtcagtaacgatcgatcaacttctgaatgtatagtagcgttacaacgcctattaagatcgatcaacttctgaatgtatagtagcactgtataccactctgttactacaacgtaccaacttgtttgagggaaattacaacaaccaactgccagtctgccactgagaaatcagatcaatgcatcacttggctctcggtgacatatcctttgtttaattggatgctaattgctcacagatcatcactagctgcggatagccagcattaattctcaagagtgtagcactgcgtttttcgcaagttgcaatgcaatagtgtataaactctgtaaattactcccatgcattcatcatctagatcatgcctaggccgtagtacactgtgtaagcgcaggatatgcacagtttctctcgtgcagtcagtggcatttacacgcgaacttagtacgagtactcagagcaaagtataatggtaggctataagccgactaaatgctgaggtggagaagagaagaaaggagagagagagaggagaagtgggctgtaaacttacagccggcttggacacaagaaccaagaaactctgtgagagaaacaagtgggccctgtactaatcgtaaagagctaactattagagcaagtttaatagtatagcccactactaactccaaatcatctatagccaatgtaatagccaattcatacaatagttgcttactatactattaatacctggtcccacctgtcatatacacattacgtcttagagtccgtgctgtagctagctacagatctgcagcccgctactcttatctctcttcatttatctctttaaaatatgtttatagctggtttatagtttacatgctcttatatagataggctaagagaaaactacaaaaaaattttatagccaacagatcgactgtattattagccttgctctcctatgattcagccgatgagtcagatactcaaatggaatcgatcgcctaatcttggtccctcttcgacgccgacgatcgagctaactccttaaatggctagctagcttaattgcgacgaactgaaacgatattatttgatgctactgctaattttctctctcgatgcaaactgatgctggccgttgaagatggagtagctagctgcagtttgcaaaatgaatatagcagtacattcctctctctctatatacacacacgccgtatttagttctaaaatatttcttcaaactttcaactttttcatcatataaaaacttttctacagacataaactttcaatttttccgtcacattgttctaatttcaaccaaacttttaattttgacgtgaactaaacacagcctattagcagtacacatcggcttatgcactgtcgattataattaacatcagctagctacatcacgcctactccctccctcccccaaataactcaaccttacgtaccacacagtagcagttactggttgtaggctcgatgaagctagctagacgaagaagatcgaagaggatggcgcaggcaggtctgattgcctctgaagctaattactgacagatttccttgttggcgatgcgatattgctcgggttcgcgtccagagtaaattcagattcaggccaagggcagttattagaacatagagctgcgcggaagcctcgatcgagcacccggggggggggggggggggggacgacacatgtgggtaccctgcacggacgccggtctcccgtcgatggcacagggcgtcagggcgacggaccatggaataatggatcgttgacgtcgtcggcaatcgccgggacaagcaggaaattaaggggctattatttgagaaatcctaagattctaaaaaatagttggttggtagtgaacttttaagaatatggagaaaaagctgagttttagaggcttacagttcattttcttgattttacagctacagttccctataatctgaacgagaaaagcagattgtttaggaaaaactagctgcgagaaactctctcaaatatctaaacgcgctagctgctgcatacgaacgacgccattggtggtctcctagtgctgatggagttgagagttgagtgagcgatgttgcaatgctgagactgttcatggcgatcgaaacgtcgaatccaggtcgtgctctactgctctcactggccgtccgtccggtacagccgtgcagcgtgagagcccacggcgggtagtgcgccggacgagtcctgctcctggctgcaagtgactgcacgtgaatgcgcgcagcaacataactgcggcgtgggtaggtgggtgggtggtaggcgagcacggctgccggcggcgaatgcgcgtttctgctgcgggcgccgcgggaccgcgtctccgatccctgcggcgcccattgtacgtacggtggactccctgcgcgcggtttctcctcctcctcctgtatctcatcatctgatgatcgagtcgtctggctctagtcgccggtgagccccactgcaccccagccacgaaaaaaactaattgtacaaattacaactaatttacgagacgaatcttttaaatctaattgctccatgatttaacaatgtggtgctataataaatatttgctaataataaattaattagacttaataaatttgtctctcgattttcttacggattatgtaaacataaggcatatccaaatacatcgtcctaggatgggtgtcatcctatgctaggttgctatattctaggacggaaatagtagttttttaattagtgctcgaacaccctatacgacgccctatataatacttgatgtaatatgctaaaaatttacacgtacataaaaaaacactccctaatttccgcggttggcgcagctggttttctaagctgacttgactagttgatttgatggcccccctttgggccgcccatgtcacacgtaaatttaccataggccggatcgtaaaaaaaaagagcgggatacttcgggccgaaagtagtagcaagaagatggccgacgactacatgtgttttgggccaggcttatctaggtctatttttatttgggccacaatgctgaggcccaaattggaactatacccgaaggatgagataccgccgtctccacggccgaagcttccacttcagccccacgtgaacgagaatctgtgcgccataaacgaggcaacgtgttcctcgagatcttcagagccaggctgttcacagatcaactagaccaagctatagccattgcaggtagatcgggagcttgctagctcgaccaagctgcctacctagctcgcgtcggaattaatggccgcgaccgccggcgacgccgccgccgccgccgccgccgcctgccctgcctacccatggccgagcgacgggtgagagcatgaatgcatgtcgattgctttcgcttgatcacattaattttgcatgaaattaaccacgtcgcgcgcgctaattaattaacccggtggagctaattttctgatgtgatgtgagcagagcccagcgcgggcgcaaggtgttcatgcagagcgactgcacggcgtgccacggcatgttctcctccaacgccggcctcatcagcgacgacgactcggcgtgggagcccaaggtggcggagatcgtcgtcgtggaggaggctcatcagccggtggcggcagcggcgacactccgcggcggcgcgtactacccggcgccggacctcaccttcattgcaaaggtaattaatcaagcacacacgcattaaggcattagctagttaccttcaattgctgttcgttttgccaaattatgtctgatcccgtgtgcagggcctgcgaggcaataacctctactccggcggcggcgccagcgaggcggcgaggatgctggccgatgccgccgcggcgtgccaggagctgaagaagcgggcactggctagccccgtctggctctagtttcttcgatctgactagatctcaactctgaataatgcagcctgcataatcagcagttgagcgctgcttctgcaaataatgtccccatcgatcgatgatctcttgtagcagtagcttcctccattggagctcaaataaaattaattactccgctcatatggatacatcgccgcctatcagtcgtctagttcgtcggctgtcatttttaaattcctttctgtttacttagactttctggccgtgtggctaccggcagagaccgaaaatataatcaatttctatttaaaaaaacatagatgctctttcaataacataaacaaacgaaaggaggagacgatgcgatgcgatataaatggttagggtgagctctactcgtgtttctagcgcgcgtgcaccgaatagcatttctggtggctctaatacgctttgcaagggagaaaacggctttgccaccataccatgtcgcattcgcatagctggccgtggcccgtggatccgctaccatccacgtcagcacgacgccatccataatcggagctcctcgttatctgcagagagaggcgtcggtccgctgcgctgcttcacagtcgatcacacgcgcccactcgaccaggtagctagcttgcttgctgcagctctctcgtcggaatcaatggctgcgacttccggcgacggcggcgccgccgcctgcccggcctacccgtggccgaacgacgggtgagcaccgcgtggacgccggcgagttcgttctcgcttccggccgttggccaccgcatttcggggcgctaatctggtggagctttttgtgagcatatgtatgcagagtgcagcgagggcgcaaggtgttcatgcagagcgactgcgccgcgtgccacacctcgctcccctacgccggcctcagcgacgacggcgcgcgcgcgcgggcagcggctgtggagcccaaggcggcggagatcgtcgtcgtggaggaggcgcggcagccggcggcggagaccgtcaacggcggcgcgaactctccggacctcaccctcatcaccaaggtagctataatggaagctttatttagtcactaagtactaaggctcagggttaactctatcggttgaaggtttttgatcgggatcaccgaaatcccgaaatttcggtccgaaatttccaaaattttgaacaaaatttagttgaatttgaataaatattacccaaattcatgaaaaaatttaaaaatttcggccaaattaatatcgtatcggaggggaccgaaattttggtctgaaatttccaaccctgctaaggctgtgtttagatcaaaaaggtgtaaagttttggcgtgtcacatcggatatacggacacacatttgaaatattaaacgtagactaataacaaaacaaattatagaatccgcctgtaaactgcgagacgaatttattaagcctaattaattcgtcattagcaaatgtttactatagcaacacattgtcaaatcatggagcaattaggtttaaaagatttgtctcacaatttacacgcaatctgtgtaattaattattttttcgtttatatttaatactctatacatgtgtccaaacattcaatgtgacagggtgaataattttgccaggagatctaaacagagcctaatagctattttagcatactgttcgatcgttttgcctattttagcttactgttcgatagttttgccgatgatctgatccagcaggggctgcgcggcaacctctacgccaccgcggcgccgaggatgttggccggcgccgccgcagcgtgccaggagctgaagaagcgggcaatggctagccccgtttggctgtagtttctgcttgctccatgaagctagcaagcagtgcactaatggcatcagcagttacagcactgcttctgcttgtagcttctggcactgaaataaatcactccactcgtatggataatggatatatcaccacgtattgcatcttgtgttttgctcactgtatcctgctgtaacaataataacatgaagacacaaaataaattgggggaaatgatatggttttgtatgcagcatttacatgtaaatgagtggtgtctttagtctggaacttctaaaaaggtactcgtgctatgttacaagtgtacaccatcgagagatggataagctaaccatgcctggcactgacttattgtgagtttgttcctgaactacaactacaatctgacactggttacactacagcatagtcatactttttcacaaaaaagcagcagctttggatctccctgaacgaaaacttgtgtaccgaaggaacagcaacgcagtttcagatcaagtggacagctcatactcccagtatttgggatatgaatatgattctcatcttctacagccaatgagcaaatcatgtctgaataaaattggccctgattctcacttcctgcagccaatgattcagcataaggcgtctcttctgaaatttccagattatgcattcatttctcaggtttttgctctgctgaatcagcatctcctgtttgtccctcgcacgtttccctgttatccaaaacctgagtgggtgcatctagagatcttggtaatgctcccagttgtcttaggctctcgctctgcttctcgattatcatggcgaggtacttgctgtgttcttctacttgcagctgcagctttctttggatctgtggagaggaaaatacaagggaccctatacattagtcaaacgcacaaaatctggcgtgttcattcccttttgcagttcaaaacaaaaatcaagtatcttattattgaaagaataagggcacctcaagttgttcgtgaagttgtttctgcaagccaatctggacccttaatccttcacaggtggtttccatgcctctgtagtaggtacacagtcaagactttagaaaacactggcacacgacatatatttgaacttaaattcatccagagataagttaggaagaaaatgcaaattcatccaggtcggagcatagatgtgatattatgctccactactcatctaggccaacacatgatatttataaaatttctaggactcagagatatatatcacataaaaatcatctcacttcaagggctgagaagaaacttcatccgtttggccacttttcgcagattcacctatgagaaaaaaataaagaaaattgtgtaaagctccagatcgttcaaatttacttcaaatttaaataggcacagcgcatgataaaattcagtctcttaaagatcaatatataaactctaatagcatcaacaacatagtacggtcactgcaacattctaatttagtacaatgaccggcatagtgcaccacgtatcttgttatggtgaaattaaaccaaaattgaaacatcgaaacacaccgaccatcagatagttgaggtcgatgatgaactgtgcgatacttctgcacaagaataacccatggccatcaggaaaaatcaagaagagtcgtataaaaagcattgaaaattcagaagcaacaaatgcagacctgtagatggctttttacatggtatatagttaagccgtcaaccttcataactttctggacagcttttggagttgcttctgcaagagaaaagtaaacagaaatgaaaatagatctaggaaaacagagacttgtacttgtttcttcttgtgaaaacagcactgttccgtaaaagttcaagatgaaaatatgataagaaaaacagaggatcagggaccaactttcacttccaccaagcttgttaacagcatcaacaaaccgctcatggagctcaggtgtccatcgcatccttggtttggttggagcaatgtttgaagaagcgatattaccagaacaaatttcattgaagttgggaggatttgatgtatttctctgtgcatgacaatgcaaataatttgaaggtgttgtacttgtcgcatcaacagcctggaaatgaggggaaatgttatctaaaattttaagtagaccaatgaagagctggtctaaattgccgtacaggctgtgagagaggataagaaatcatgaaatagttagtgcaccatccaaaagggtcaaatcagataccttcagcacagaaccagcagacaccgaactttccaaatactgcaaggaagtgccagatgagaaccactcattttgctttgcaaggttggtgctaggacttgctgcaatgttatcttgtatttgttggtcaaaaatagtcatatcttgttgatcgaagaaatcaacactagttggacaaacaaatggtccaggcagtggttcttgactccaactattctgttcagatactttaggataaaccatccttaaagaacttggattacccttgtataatgactgtgttggcggcaaggaagaatcacatccagaggtatcaatagcatatgattcagaagaaagcttgccgttaggtgattcacttttgttgatataaagatctgatgtaaagttggaagctaacatacacattggagtagaagcatcaaatgagttgatagaactaccacactgctccctttcgatataggatggtctatgctctgaaaaactaggaaatgtaacttcagagagttctggtactacagttatagctggcgaaagatattggggaacttttccattgcgaagctgattcatagttgatgtaggcctgtttcatgtacccctaagatgattcacttcaatctgttaaagtggagctctggtcatatcatcagccaaatgcagaagtctattacatcaaacttgaaaacgaaataagttttccctggtcttgttcagatattaaaagtgttttttttccacatagagcaaagatttgtcttacaacaattcgtaacccaacagctagatatatttctatgactcccaaatagtgatttggtgagcacttagaagggtgaacatcaagtatgctgctatacatcttagcaaagaaaattgtaattggaccaaaatatactgatgtgaagagtgaatagagggtaaagagaagtatatttgaagaagcaaaaaaaaagaggggcggggaggggcacgattgaggcatgaatggaacataattttgcagaattaaaccactgctcaaacagaaacaaagaaaatgaatgcattaaagacttgaatagaacaagtcccgcctattacagtgattcccaaagaaacacactgaaggatagaaggaaacagaacaacaaaaaagaaaatcttagagagaaatcagacaaaagattacagaaatgagtaatttgatttgaattctgtgttgctaaatctaaatggttaattgaactttgtgaagctacttaccagcctattcccagaatgaaatgaaagatgaaacaaaggtctgaaactaagagtctatgatcctcttgggggctaagaagtttagtttgttgtgtgtatcttggtgggtggggttatggttctagagaagtacttaatctgctaaagtatccaatttttttataaccactaaacgtaatgatctgttactacttaaaaattatctccattttattttgtaaatgggaccacaaggaccactcctctgtaatgtaaatattaaacctaccagctattacatgcaccaaccatccccagaagcaaccaatgccagattccttcagtttttacaagctttgaaagtatcaaaagagatataaatgctagattagtagcacagtgcacggacctatggcctcagatatgttcacttctgcttgcatggtccaaccaaaacatgtatttcgtaaaccgaactataaggttgattagttatagagctgtaataaaaattccaatacagtgaactcttcgctagcagtatctgcacatggtacctctaccttgacaaggcttttattcttggtgaactaactgtgtggatgaagcaataatcataaaagaatccaaataacaagcttgcaatctaggagtatttttatggctactaggcgccttggagttgacaaactcaatttggcatgtaacggaagctttcattgaaaagctggcctggcaacgtcttgttctaaattaataattatgtttgccatcatccaaacctataaataaagaatagcaggaatagaaaactggaagtttgcacaaaattctattaattgagttttggagttctgatctggtgcaggtggaatccagaagcactaagagggaaaaaaagaattgaccaaaaaaaagtcaatcaaagcattgtttggattccagcaagttatcataggaaaaaagaaaactctggttgatgccttatcctgctgttgttggtctcccttggattatagatgctttacaactttagtagggctacaatagaaagagagagatgggatgaaaacccaaatagggaggaagctaatgccttaagcttattgtcagtaaaaccacaactgttgaacaagtcactcataaggtttcagtttaattgttcagaaaacaaacaaaaaggaggacaaatatggcactgatagatcaccaaaaatcaacatggcctggacattcatcatagcttctcaacttaaaaggcaaacagagaagaggcaaaatctattcaatatccagtttgacaatctgcatgaactgtcagtcaatgtgtcatctggctaaattttccatcacgcaaaaatgtatatcatacatggaaataactacagcggtcagtttggaaaataaattactctgaaatatcagtgcatactgcaaatctcctgcactgtcttgaactgtggcccatggctactgccactactgaattgtcagttgagttctttgaacatggaatgtgtagagacattgaatcctttcagaaatctcacctagaatgaaaaaaaaataagcatgcttggaaacatacgagcaatttgaagtttgagaaagagggtagttttaagttatggctatcaaataacttacagttctttcattaaaaaaaacacaaatttacttacagttttgatgctggtctattccatctcctccgcaattgcattttctgtgaaatgaaggataagagctgatatcacaatttgcaaatgtaacatagcctgcatagactcagctgttggtaacataccggtctttggaagcagcttcaccgagttgcttatctatttcaacaaggtatatcttaaacaagcttgacctataggatccattacaggctaaattaccataataatgatgccacagaacaggccatagcataaggtgaaaagcaagcagctcaccgtggcggcattgctgcagcagtaagaactggaggtagaagccataatatgtacggttcgctctctaatgattgccttgcatactcacaaatatccatctcctattggagttcaaaggttcagttaaaatattactttctttaaagaacagcgattaacagctttgagaaataaagaacttaaacaattcttgcccactgaaaaaataagaggtaaataatgaccacacatgaaaggacttgatctggccaacattatgcccgctaaatattttttttgtttcctcaggtatctcagaaaggctgcttgatcgtaaccaacaaaaccaataggcaattgctaacttctaaaagtagtttttcacaattattgcaacatcagagtagtgccctcaataattgacataatgacgctttgatagtactgacagttcaagtgtactaccaccattccaaaatataagcatttctaggattcatatcctgtaccacaacacaagcatgtctaccaccatttacactacttgtcccatcaatcactttccgttcaaatttctttccgttctaccctcaaccactatccctcctttattgaggggcaccaaagtcttttctcctcaaccttaatctctactaaaaaaaactagaaatgcatatattttggaacaggggaagtagcttttagaagctgttcccaagtttgtataggtattcgtttggtttacatggtcatgatcacttcatttcaaaaggttcccgcagaaagtaatgttcccaacagatggaagaatcaacaaaatccatcaacaagacataaaataaaaataaaaagaccttgaaaccaagaagcttgtcttggcattcatcctgagttgttccttgaagcaactggtgcagatcagcatattgttttgatataggaaaggaactaaaagtatgtgacatgatgctctctattaatgagttccattgccttgcaaccaatcccaacaagcatagctcctataatgcaacacaacatattggtattataacatagataatgaaagtactgacagagtctacgagcaaagactaatacataccatgacttcaatgatgccactttgactagaatctgcagaaacttttaatggttcaaacaatcccatccactgctccttgggagcattaaagatcatattagttcctgacatgatccgaatggtacgctcatcaagcaagtacgacaaacactttgctttccattgcttccacaggataaacttgtcgatgatttgtgttttcctgtgttaataatagttttgagtgagttcaaactggagcctgctatggtctcaaaaaaaggacacagatatatatggattaacaattgtaacaatatagaaatttgggggattaagggattacatactgagcagttgctgaggtgcacaatgtacttcctgcactatcaaagctgtcctttttcatgctttttagaagtgtgttcagttctctctcagccaaagaaatacacgatcctgaatccagcttcttctgtagttctttaagtagaatctgtgaattacccgtaaacaaggattcttcacaaaattcatcagagctagtggaatgtccaacatcacgggcattcttggttcgcatcaaactaggtaaattcatatctaaaatcgattgcacatactcttggcacacattgcattcaccactagcagaaatgccatccatatccatctcaacaactgcttgaagtacagcacctaaattctccgcattcgttgttttcagaaaatgcttcacaaccaactctcttgccatcgcaagtgtttttgatcggatatcctcaataccctgcatgacacagggtagaacatcactacatgcaaaatcagaatggatgcagccaagaagcatcttttcagaagcaccttggggaaattcgggcttgaagcgagttgaacgagtgcagcatcgagctcacttgcagactcatcgtactgaccatcgtcacgcaggttcttgaaaacctgaacacaatgcaggaacatgtgttaacatttcagttcttcacaacaacagaaattcttcatgtggtcagtgtctgtccattaaagtaggaaaacccccctcctaagcagcattgagaacgatgaacttccaatctacacggccttcccccgagatgctgagagaatcatggcgtcggagggggcacgacgcaaacctaaaccccagtgcaatttcatcaacagagatcaaccatacctcctcgaagaagagggcccattggagggccttcttgacgtcaccggagcgccaggtggcggcggcgccagacgaggtgcggccgccggcgaggacgaggacgtcgacgaagccccgcaccaagccgagcaactcctccatggccaccgtctcgtgcgcccaccccatttgcgatccccttcctcacaattccaacttttggagggactagtaagcaataagtacaaagttggttatttctacttaagccccttaatttattttgtttcacatattctcacccgtgctgttttgttcatgttagtatagtaagttaagtaaaaataatagtgtgtcaagggggtaaagtgaataatagcagcaaagccctagaaaccccgactatataagaaagagaagccgtccccctcggccgccgccgccgccgccgcttgtcaccccttccgtttccaagatgtcgaagcgaggtaaaatctcttgctccctcccgatgatttcttctcccacatgatcctcgattctggtctcgtatgctagtttagtttgcgcggcgtgatgcttcgatttggatgcgcagacatctgctgtggattaccgtttctaagatgcagaagcggttgttcgatgcgtcaattgctgtgtcgctaggatcttgtgcaagtgttcgagtagcatgatttagtctgcttgtcgcttcaagggtggtgacccgttgtatattttgaaggcagtgatgcgttgtataatttggagatgtgttgcttttagtgttacaaggaatgatttagtctggttatctgtagttagatgtggagaagatttttgtttagctgtttgttgacttaggtttgttagatccctgtatgtgttaaattcttttaaggaccttcggaaatgaacatccttcaagtttatgcacgaattcttttagatgtttgtgaagctgcatctttatagatctttactagttcagttgctattgattcttctacttcctattcaaatagtgtggctagtcacatttctcaagctaaaccattttaaattttccctgtgttgttattatcaaatgagaatgaggcgaagcatataccctttgaatgaccactattttgcatcaatgatttagatgttttggacctaacttacctggctgctattgctctttctttgaccgcagggcgtggaggtagtgctggtaacaagttccggatgtcactgggtctgccagtggcagccactgtgaactgtgctgacaacactggagcaaagaacctttacatcatttctgtgaagggaatcaagggacgccttaacaggcttccttctgcttgtgttggggacatggttatggctactgtgaaaaaagggaagcctgacctgaggaagaaggtcatgccagctgtcatcgtgaggcagcgcaagccgtggcgccgaaaggatggtgtctacatgtactttgaaggtactttctgtttccatgttttggtgcgcttcatcttgtgttagttatttagtcagtcaactagctgcatgcttctttttaattcatatactgttgaattataactgaaattgcttgcttaaggccttgttcggttgatcctcatgagggagggattggaggggatttattgcacacctattgtggtgtggaattattccccctcaatcccctccaaaccgaacaaggcctaagtggaaggcatttgcacacgactttgagcatgttacatgatagttggccagacttttttttttcagtttctgtaattctgtctaccaagataggattcagttttagtgtcattgttcaatttagagagaacctcctgatggataaattagattgtgtttctgcattgtcattagttagcatagagctggaatgcaatttgacctgaaatagacatcatagtatgttattatcttgcattatgccacatttatcattaggcatgtgtttcatgaaggaacttacaaactttgtggtcttcttttgctctttcaactgtatgtaatgtccgagtgaattgtgaagctctttcatttgtataagtaatatgtgaatgaagtgtacagctctttcatttgtaaataatatgtgaattatttgtaaattgcttaattcgtaggatgtctatacttttctgtgttacctgctgttctcttgatcctttgtctacagaattacctaatcacaggtttatgggttatggttcaattctaatgttcctttggtgtcacatttgcagacaatgctggagtcattgtgaaccccaagggagagatgaaaggtattatcctgcaaattctataattctacacgtcgcaacaaatatgtagttgaaaagcatgctgaatttttttattgaagcatcgagccatattttgttgcacttatacatgaccagctatttcctttcttgaaatcttgtactacaaaactaataatgcatagcttcacgattagcctgaccttataaatatgcacttccatgatgcaggttctgccatcactggacctatcggaaaggagtgcgctgatctctggcccaggattgcaagtgcagcaaatgcgatcgtctaatcgaagcagccattgaaagttccattagcgttttctcttcttgaaagagttaaaagagctgctagttttgtatcgaccttaaaaatagtttcccaggattatgtttgtgccgctggattatgccccgttagcttctttaaacacatttgagcaatatgatatggcactgatgcctagcctgacatttggtcctagtttaaaacttaaagctgtcttggaatttcgatgacgcgtgccatttttcctgcaaagtgtcttttttggttatatacagatgcaaattgctaatcagtagtacttacaacagtagtatgcgtgattttacgtttacatttggtcaaattttcgaatcgaatcgactaaatttctaccaagttctctttaattggctcgtacgggttgcgctaacaatttgggccgtgtacgtgcttgtggcttattgggcctggtcctgattggacttccttatctgtctatcacacaccacctgagtcactgacacgtgggccccatcgctctccaccctccactcctcccaagcaggcagctccccgctccaccggcgaaaccgccgaaccatgccgatgtggtctcagccaccgccgccgccgtcttccctccagctgcggcggccgccgcctcccttgccccaccgtccccgccgcctccgcagccggctcagccccatcgccgcctcgcaggacccgctgaccgccctctctcgcctcctgtggggccgcgcgctgcctccctcccagctcgtcctcgccgtccgccatggctggaccgccgcgtggggcctcctcatgcggcagctcgccccctccgacccggccaccggcgccttcacccgcaccccgtcccgcttccccgccgtcgtggggacccccagcgcgcgcctccacctctacgtcggcctcccgtgcccctgggctcaccgcgccctcctcgtccgcgcgctgctcggcctcgagcgccgcctcccgctctccgtcgccgtcccgggggacgacggcgcgtggtccttcacgccggacagccccgacgcgctctacggcaagcgcaagctccgcgaggtgtacgcttccgcacgccgcggcgggttcgaggggagggcgtcggtgcccttgctgtgggacgcggagcggcgggaggtggtgtgcaacgagagcatcgagatcaccaagttcctctgcgacctcgccgccgccgacggcagcgccggtggcctcgacctctggccgccggagctccgccaagacatcgaccgctggtactccttcatctaccccagcgtcaacaatggcgtctacaggtacaaccaaaaaaatcacacaatttattgagttgtatgtgccgacaatttcaactcaaaagtttaagccgatgagaaaagatgggcgattcactctatatttcaggattcgaactcgaaacctctagctctaataccacatatgcaccgactagtttaaccaagaacttaagctataagaatagtcgggcaattcactttatattccaacacaattcctgaaaattgcagcaagaatctaacgcagcattgctacgatcaaattgcaggtgcgggttcgcgcagagccaggaggcgtacgacgccgccgccggcgagctgttcgccgcgctggaccggctggaggatcacctgtcggggtcccgctacctgtgcggcgacacgctgacgctggccgacgtgtgcctcttcacgacgctggtacgcttcgacctcgtctaccactcgctgttccggtgcacgaggcggaagctggtggagtacgcgagcctccacgcctacacgcgcgacatctaccagatgcccggggtcgccggcacctgcgacatggccgccatcgccgacggctacttcggcgccctcttccctctcaaccccggcggcatcctgcccctcgtgccggcgagctgcagcccggaggcgctcctggagccacatggcagggaggcgctgtcttcttctgctgctgctgatgctggtggtggcggcaatggcaggcagctcgaagcaacgagtgcttccaactagtggcagtagacagtagttgtgcaagtgcaacatttcgtcagtaaattttcgtgtgcttctttgttattacgactctagtgtaagattttgtaaatcaactgaaattgctgctgctgcatgaggatcatcatactatccatcctaaaatgtatatatactgattgttgaggaacaggaaagacaatttgatctctattatacttttactccttccatgtatgtatatactgattgttgaggaacaggaaagacaacttgatctctattattcaccttacaattgtttgtttatcaatcagttccatagttcatatcctcttggaactgcagtccgtctaatatgtttgcaaatactatggttgctcctcttaactaatctagcagaaatccagcagaaattgcatttgcatttgttcgaaaagtgatatccctgaacacatgttagtaaaagtttaaccacagtctgttgcacaaccaggtacaaggtcaaatacgcatacaagtagccgttatttctgaaatattgtgatcagcaaccatactaacatggacacaatgaagctttgtaggaaatatgtccagcattacatgttggagtacaactgctgacaagtatctcatctatctgtattatgatacaacttccagtcaacatgcaattagcaggtgctctttttatttcgaaatgtttcatttttgtaaataaaacaaatgcttctcatcatccaattcagttgtatatcccaaaacagatgcccagggtacaacatttgcctattagctataaaacaggcacctaacatttaaccgtgaatatattaaggtctatattcagattgcctgcactggaccctttattgtcattttcttgtatcactgccgtcagcttccttgtagagtttgtgttctccaatatactggatgacttcatcacatacaagatactttattgataggcatttttttatgcattctctgcaatttgattgtgcataaacacatgactcacatgtcagtatccaacagaggatgttggggatattagaatgccgtatgataaacctcaaacaaatgcatgaaagaacaataccttactctagacgaacttatttgatttggaacaatctcatcaactgaaataatattatcctgaaaatactccataaagggataatgcaaacgtcatcagaaaagaagactaatctactgtagtagtataagctccataagctagtcattcttaccctgcattcgttcagtatctcactgctggatattattttttcaacatcttttccttctctacgtatgcaaataacaccaaagtccttacatatgatcctgacctagatacagaagagggtgtcatcaaagcaagctcttctgtgaataagaatcacacagaaactagatataacactaagagttaaaatgagcacataagttctctatattgacaccagagttcgacgtttacacctgatcaggaatccaaactcctggggtgctgaatgattcgagcaggtcggaaccacataaaagcattacattgggactacctgtgtcattttttatgtcagtacatgttggacttggacataattgattgtatccaagacaaagatgcactggttcacattatccaacagtatgttgaaaaaggatttgttatcttctaaaaaaactggttgctagatacctccatcagctaaaccatccttggacaaagcattccgaattctcgagagaacagtcaaggtgcgttggaaacctttctgcattgcctacaccaaggacacacaacattctgtacaagaaatgctacagaatccaccaggacgtataagctgaatgaaacaaagttacctcccatcgatcaaccatcacaaaagatgagctttcacatgctagttcgcataagcgaattcggtgggctgcagataaaaggccctaatccgttccaaatcttaaactcaatcaagagaacagtggtgatattttttagataatggattaagaatccggcctctacaccacaaggagaacagtggtgatgccacacattaccttcttcttgtaagcatcgttcaccggagacatgtaaccacccaagacagaataccctcgctgctgcaattcatcctttgccagttctaaatgaaacatatcagacgggaaaaaataattaaaaaaaactttcttgctgtaattatcaagctgttcatgggacaacacaagcttataggcataaaaaatcaaacaaaatttagaggcttaccaaacatgcgcaggtgcatgtaggtgggaggattgaagctcccggtggccacgagcacagccacacctcgctttcctccctccctaccacatcaagatcgaatcaagagatacatggaaggatgagaccacccatcaagcaaccaacaacaagccaagatcggatctcgctacctgcccggatccacggcgagcttctccgtggggagaggcaactccagctcctccatggccgccctccagtacctgcgaagattctcaactgctacgaaatttcgactccgccctaaggaggtccggccctcacttccactgatcctctcagtattccgtggcctccttggtcgccggagcacgccgccgagctttgctggagccgcgccgccggcgatagggcggaagaggaaagagcgagctcgtcgcttcatgggcctaagttgggaatagcctaggtgggccttgtctgcttaataggcctcatctacttagtgggccaaaaggcctacatgctttttcattcgaaggcctatatgttagttgggcttgacctccttactaaacctaacctcgagcagttgcgctctctccttcttcctcatctccctcggcggcggcggcggcggcaagcgaaggagaaggcgaaaatggtgaggagaatcgcggcgagcggcgatcgatgcatcttgtagcgcctctcctcgcgtggatctgacagggattgatctggttgctttgtgttttgttcttctttgcgcagggcaagggcacggggagcttcgggaagcgccggaacaagacgcacacgctctgcgtgcgctgcggccgccgcagcttccacctgcagaagagcacctgctcctcctgcggctaccccgcggcccgcatccgcaagtgtaagacgagatcctcctctctctttttttcccatgcccaccctctcctttaattagctctttgctagcttgttgcgatgttgatgagtttttcgcgctcccatcagttcaggcatgttgattgcgctgttcctgtgcctaggctatgcttgtggtatatcacgtccgagttattttgttttttgatgtgggttaggagatttatcattatacgtttgcttatattgtgtcgcatttgcgataatactagtaggttctgaacatgcgagagattttgtaaagacgtgaaatgcaaaactgtactggttaactggtagcgtttgtcattatcgaattacttcattctgttatgttactattgtccggtgtacatagttgttgttcctatatgttactttgcattgtcaaagtatttgttacatctactgttgataattgtggcagattctttgtgacttgcaatctgttctgattgaaaggaagcagtttgtgtggggatatgtgctttcagattcttgtttgtttcaatcaaattactcgagttgacatcttttggccaatcccttgtgtccaattacgaagttgtggttaggtagattatcatagtgtgtttgcatttaatctggactgtttgggggagctagagattctatgagaagctgcagctgctagaagctccccaaatataagccctaagcctgctcggctcctggctgcagaccgctgctgctgctgcttgatgcagcaggtctcttgctgttttcattgatgaagtttgatagaatctgctcagctcctctgatatgtagttctgactactttgattctttctcgaaatttgaaacacagacaactggagtgtgaaggccatcaggaggaagaccactggaactgggaggatgaggtaccttcgccacgtgcccaagaggttcaagagtaacttcagagagggtatgcttatatctcttcttgctatgttctatcacttgttcactgattatttactactccatctttttcacaatgtaagtcattctagcatttctcacattcatattgatgttaatgaatctagacatatatctatctagattcattaacatcaatataaatgtgggaaatgctagaatgacttatattgtgaaacggaggaagtatattgcaaatgctgtagcacttgttaattgattattgcaaatgttgtccagggactgaggctgcaccaaggaagaagggggctgctgctagcaactagactgcacttgttgcgctaagctgggagaccagtgtctttttgttgcttaatttatcgtaactctatgttcctaaatgaggcaaacgatgtctggttttctgttattttgcatcctggatgttaatccttgagttttgaatgttagatcgttttatccgttatcatcgctctcatacgcatttatcgttgctgttgtctatgtgcaactcgctgcatcggtttgcaattttggtgatgcgtgaaatactagaatcagtattcagaagtggggattgtgcatggtccatcaggctagttggctactccctgtctctgcacaggcacagagcttagctgtttgctcgccttcatgacatttttccctagtccaacatgtatcgcacattcttgtgttctattgctcatgtgctcatgtttcttgtgtatcacgtgcaaggctaaatttgcgctacagtaatatgtttaccatacacagatagcacttagtactgccaaacagcatggtttgaactcctcccgtttcttctatcgtttaattccaataattcaaagcacaccaaaatactcctgtctgagatttagaaaaagagtgcaaaataaaaggaaataaatgaaattgacaattgctacgggtgtataaatcggatcattgtcacagctcacaaacatagatttcaaacaataacgaatcgtacctgaattgaaaccgctccaaataggcaggcagcatctgcaagatcgagctgtagagccaactcgtacgcgccatacttggttccctccaaatttgcctctccttttaaaagccacgcggcgtctcaacctgctctccctcgtgtcgttgcttcgttcgatctgcacaatgtcggcgggcggccggcaccgcgacgactgctccgcgtcgccgccgccgtcgccgtcgccgccgccctccacgctcctccagttgctcgaggtcaccgtcatctccgcgcaggacctgcaccgccgcctcggccgccgcgtgcgcgccgcctacgccgtggcctgggccgacgccgcccacaagctccgcaccggcgtcgacctcgccggcggcgccgacccgacgtggaacgaccggttcctgttccgcgtcgaagaagccttcctccggtccgacacggccgccgtcaccgtcgaggtgcgcgcgccgcggaggttcggcggtgacgccgtcctcggcgtcacgcggatcgtggtcagcacgttcgtcgggtcggcgtcgtcctccgcgcgaggcaccaccggccggcaggtggcggcgctgcagctccggcggccgcggtcgctgcggccgcagggcatcgtgaacgtggcggtggcggtgctcgacgccaccgacgcgcgcgccgtgccgctctgcagctcgccggactccccggacgcgttctccgtgaaggacctcctggtgaggaggcccgggtcgctggcgaggatcgtggaggtgagcgagacggaggaggccgacgacgagccgccggcggcggcggcggcggtcgtcgagcactccggggcgatggacacgaggggctccgccgtggagcagaggaagctggagctgctgctggagaagtggaaggcggatctgtcgccggaccagcagaaggagaaggccaacagccgccggagcagtgggccgcggcggcatcgccggaggagctcctgcttcggcggcggcagcgcggagtgggagaggtgatcatcacccgtgcttcacgtgtactgatcgtctgatcgcaagactgcatgctgcgaatgcccatctgtttagggttttttttagcagttatttattttttatttttgccagagatgttcattctctgtttctttttataaaaaaagaagaagaagaagaagaagaagaaagaacttgcaggacattaagcagcaagggcagaataaaatgctgctcaggcagttctgtagtggaaaaaaaaggttatgtaaaatgtgtccaaatcaagctctatattctttcgatggacaaataaataagcaggtttactagcggcatttgggtatagattaactacagccttattattttcattttgtaaaaattgctgttttcgagctgttttatgcttacttttcaataaactgaattatgcaaaaagaaaaaacaccatggtaatggagtgagttttttcctggatgtattattttgaatgtacgccttaggacacgtaaaaattgataaaattagaaatactccatccgtattttaatgtatatgacaccgttgactttttgaccaacgtttgaccctttgttttattcaatttttttgtgtaaatatgaaaatatttatatcgtgcttaaagaacatttgacaatgaatcaagtcacggtaaaataaatgacaattacataaactttttgaataagacaaatgggaaaaaagttaacggcgtcatacattaaaatatagaggtagtagttaaaaaaaagagtaaattgcaccaacgttacaacaactgacaggtctgatatagtaataatggcgtagatggataataatagttactcaatatacagagtacaaaacagaaaaaaagattatatactatatccagtcctactttttaatatctaaacaagggatcctttgctaagctaaacacagtagaagggaaaaaaagggggaaaaaatctcaacagaaaacgcatgataagtggaggtgatgaacaagaagcagaaccaagggcccacatgtcaatggcccatagtaaaccacctcttatcccctctcgtcctccatctcttcccactggcctcgcgcccctccacatcacacacacgacgccatcgccatggccaactccagctgcccctccacctctcccgccgcgctacgcctcgcgcgccccaagctcccggactccgccatgatcatgcagctccagctccagctccagcacgcgcccctgttcccccgcccgcccgcggcgcgcgcgcaccaccaccaccaccaccagcgacgcctcctgctcgcggtctccgaccacgtcgccgccaagcccgtcaccgtgccggtggggaggatgcgcatgcgcgcggcgacggcgatggtctcgcaggaggaggccgcggccacggctgtggaggagcaacaggaggaggaggtcgaagaggagcagttgcaagaggaagacggagcagctgtgcaggaggaggagcagggcggcgtcctggagggcagctcgggcggcggcgaggcggaggcggaggcagcgggcatcaccaccaagctctacttcgggaacctgccgtacaactgcgacagcgcgcagctcgccggcattgtgcaggactacgccaccccggagatggtggaggtatcgtacaccgtcaccgtcttctgcttgattaaatgcttaagtgaacttatatgcagtagacacatgcttgcttgtgcttaattcgttcctcagttggtgaacgaaaaaaaatggtgtttatttatttgtttgtttttgtttttgttaccgacatgaactcaatagtaattcccaatgttggggttcagagaaattgaaattttgttgcagcaacaagccaacaatccaactcaatgctaattaacaaacacaagcaccgttctatgtctgttcctagcgtaagagtaagatacatacccgagcacctgacacgtaagtaaatgatcatggctcatcagactaattgcttatttttgagacatgcaccagaacctacatcggcagattaaattttatctcttttattttcacgaacatgcaaaagctttgcatatcaatatattagacaaattaaactttatctcaacatctgcaatttgacttcaggtgttgtacgatcgggcgacagggaggagccgaggcttcgcgttcgtgacgatgagcaccatcgaagactgcgagcaagtgatcaagaacctcgacggcagcgtgagcactctcaatctctcatgatcaatccaaccatcctcaatcgatcaattattcagttctgttcctgaaggattcgattcgattcgtttcagctgtacagtgggcgcacgatgagggtgaacttcgcggacaagcccaagccgaagctgccgctgtacccggagactgagcacaagctgttcgtcggcaacctgtcgtggacggtcacctcggagatgctgacggagatgttccagaagtgcggcaacgtggtcggcgcccgggtgctctacgacggcgagaccggccggtcccgtggctacggcttcgtctgctactccaccaaggaggagatggatgaagctctttcctcgctcaatggaacggtaaatgcaccttcattccaccgttttctttcctccttgatactctacacccaaaagcttgcttagcttggcatgacagtgagagtagatttgttaagcttccaaatgccaaataaacggatggatgaattccagttaaatgtgtagaggttaagtggttcacatcactaataacttcgcaaaagaattcttggaatgaaccttgaatgcagtcctaggctcgaaaggagatttgcttaacctgtcttctcatgtatctgaagaaaagccttaaatcaagttttattaagatggttgttgacatccttacaaagttaactgaacgacaacgtattttgcaggaactagaaggcagggagatccgggtcaacctcgcccttggaaagaaataatcaaagagtaatagatttacttcacatgcacaggagaaacttgcaatacaatgcaatgctgccttcagatgcgattttcaggcaaccatggatgcagcgattacttgtttgagcgcatcgcaagacggcaagagcaggcacaggaagaatgtattgttctgagttacagcagatgtatctcttttttttaacgaatcagatgtatcttttgtatgcatgggaaatttattagtttctatcagtcgtttatctgatagaagcttgactgaacattgaacagttttagtctgctggggttatcagtcagttccattctcttggagctgcattttttcagtctgttttatctgtttgattatctgaactccagcagaaattgcattggttctaattgatatcccagaacacatttacgaaaaatgtaaccttttcagttcacgaaaatcttaatactgggccatgcattcagccataaaaaagatccatatatactccgttctgttttaacagatggcgtcattgaaatttgacatagtattttatcattcgtcttactatcatttatcatttttttatgttttatcgttaaaaaaattaggtataatttataatttagcatatttttattaactttttaatgagttaaatgaccaaatgttattttatgagtcaacagtctaaatccttcaaaaaaatcagaggtaatatatgttgggccataaccttgacagaagtgtggccaatttggaagtcggaacgtgggctaaggttggccttcaatcattgacacttggacagaacaaatcaatatactccaaatctcaagatttttggaaaaagaaaaaaaaaagaaatgagaataatcatgccacatgtcaccaaacgattggctccggggcaaccgtcttcccggtccaccacatcctcggccacacttgacgcctccctccgcgccactcaccactccgagtccgaggctccgagcagacgagccgagctgagctgagcaaaacgccactcaccaccatggccgtctccaccaccgcctccaacctcgtcctccgcgccgcgccaaccaccaccaccacccgccgccgccgcgtggccgcctccgccgtgcggttcgaccggcgctccgcggcgctcctgctcctgtccgcggcggcgggtgcggcgccgacggtggcgtccccctcccccgccaacgccgctggcatcgggctcttcggcatcaggaagaagctggagcgggcggaggaggcggcggcggaggcggtgcgggaggtggaggaggcggcggtggaggccgcggaggtgggtggggaggcggtgaaggcagcggagaaggaggcggcggaggtcgccggggaaggggtgcagctggtggccggcgcggagctcgccggagacgggctcgtgcaggccggggcggtcgccgccaccgaggcgctcggcgtcgtggtgggcctctccgtcgtcaatggcatcctgaggcctgaatcctagagagagagagatcactctgctgctgcatgcgtagtgctctgtagtttaggccatggatggtttcagactttcagtgaagagcttaactggatgtgattatctgctgatgactctgtgggtgtaaattaattgtcatagagtgatggatcatggtggtgttcatgtttaaactggccttgaaatttttatttttttatatttttttttgcggggaactggccttgcaaatttgtaatggcgaaactgtattgcagttcatatcgaaattccctacgttttgtgatgtacatttacactgggaaatgctatgtattactccagataaataagattttattgtattttgaacacaagagactcgaccagtcaaactgcttgaaatgtactattacttcagataaattctacagaatttttcagcgaaattacatggctgatcgctgcatgctttgtatggctttgatgcactcaaaatgaaaacccgattttgtttgcaattttgcacatcatggtggcatgatgtacagtacagactatacacgtgtttctgtcagtactttggttcattttagaaaaaaagatgagaaatttgattttggacaaattccattggaagcaaagagatagcgtgggcccttccaccactccaagcccagatgtttcggtttccaaaacaaaaatctcaacatgtaaaattagaacgaaaattgagggaaaaaaaagaggtgaaaaaaaagcagagcgttttcgaatggccacggccgtcctccgccgcccactcctcgccgccgccgccgccgccgccgccgtctcctccacctcctcctccttccgcccctcccgcttccatctccggcgatgtagatacccaccccctgtattcgccgtctcctccgactccccaaagccggttacctcctcttctaccggcggtgacaaccccgacgaggagcctgtccttcccctcttgcaagaactcgcggtgagcactctagtggcccaaatctatgtttggattcgaaagttttgaattcgcgggcgttttctctttgtaggattgcttggttctcccgcccaaattcctgtcccagcttccccgcgaccttcgcctcgatgtaagcagcgattgccctatctccgttgaattcatgcctatgttttctagtgatacgatttggctacttttttatttcaaacttagcactctcgaatagcagcaatgatgcagtgatacaaagtttaaagtgtaacttgtgaacacgagaaattctattttgggttaacaaaggtttatgtggttgtttgttgaagctcaatgatgcggcatttgatctctccaatgggcctgttcttgacgaggtaggtccgtaggtactaatgaattcgatgtccttttcaagcaagaactcgatgattattagatctatgaaggcctattctttgtatcaagaagttttcgtttttctctgtggagagatagtgtggccaagaggtaggtgatctgctgctcaaccttgcaaaggcatgggagatggctgacacatcgacatcaaacaaccttgtcaagcaacttccttcaatggaaccctacttgaccggcagtgccaaatcaggcatggattggattcatatttcttcaacagttgtgttttatgtagcatagtttcttgattgaaggatgtgtcccttgctgtttgcattacatagtgtagcatttggcaagcggctgatgtcagctggaaggaggtttacgtccatgggacaatacggcaagggagagctgaagaaggtctaggcactgaccctatccacattctatccatgctgttgttttgttgaatttgtttcggtacatttgcttattggtcactaatcatttgatcatatgttcaaacataaatcatgtagaggttagtatgttgcgattcagggcagtaggaatgttgcttccattgagcatgtaggtaaaactggttccagttcgatggaaacatctgtaatgtgggtgaattaatggcaaaaatcctacctatggaggcagaagaaaacctgtgaaattcattgtgtcatggttctctcatcgctaaattacgttacaactctgtagtcactatcggaaaatcccctctgcattgatttactgaattgtcaaaaggtatgaccacataggtatgtgtgcaaatgtaacacttctttttgttatatctctgtagattgctgaaacaatgagcaaaaccggtaagctgctatcaaaacgtccagtagttcaatctgaagtagaggctatgaaagtaaaaaggaaattgaaggtaagagcctctctgcagttaaataatggttaagggaattattctgaatgatatagttctcattcccctactttgccagtttttagaacttgagtttgagttgacagcagaaaaggcaaatattggagctgcagttggacttgttttcgggtaagagctgactcacttggcattccttctattgaaactgtgaaatatcatccacaggtctgtggatttgatatcgtcaacgcttgcccatgcatatatgttaaagaattcaccctatgatacttactaggggggacaaatctgatgtcagtgatacggttccatgctgacagatttgttttcccagcgtcaaacaccctgggggctgttagtttataccaacagatggatggtcatatttaatagttcagacatacccattccatactaagttaattctttattggttctctctgaagaaagtgctgcactcgaatagtcaaatactccctccatttttaattagatgatgtcgtcaaatataaaaagatggaggcagtagctggtttatcatatgtctcctgaggttcagtacatctaccatatatatttggaggtgaattcaagacttacagcatctcaaattcttcttgtaaaacagatttctctcatggcaactagcacgtggtatacaaaacattccagacggctcaatgcagtacgcaaacgacaacgcgttgcagatggccaaggtaacaaagcatcataaacacctgaagattgtgtagtaagttccatgtgatttctgcatcctgctaacccctgctatgctcttccatccaatgcagtcactcaaggtctcactgcttgttcttggctacacatctactgccctctctgttttcacatcaatcgggctgctgttgctggcgcagcagatcaactctgatgacaaaacggagtagctgcctaccagttgtctgaaactgtcgatgtgccattgtgtgtgctctaatcagtggatcatgatttcatgacacattcatagcgttctgttgtaccagtgtaattagcaacgcaactggataatctgtgtataaattacggaatgtttctgtacaagaattttaagttcacattgttcgtcagtgacttctcaagatcttgaattgaaaggttgaagcagctcaggactgactgactacagacttacagttacaacttcagaggatgtgaattattcatttctcttgcgcactaacagttagttcttcagtggttttgggatgagatcctaaaaatatcacatcaactagattattaagaacaaattgattaatatttatacatgctgaaaagcttaaatttgttactactgcgggcttgtttggcacagctcacctctcctggagctgaagctcagccaaacagtttcaactccacctaaaatgagagcgaagttgggtggaactctcttacaaaatgaactagagaggtggagctggatttaggctgcttcacaactacattctagacccgactcctagaactaaatttaggagttggagctctgccaaacagccctgctactactacatggttaaggggggtgtttaaatctaggggtgtaaagtttttttgtttcacatcgggtattatatagggtgtcgtatggggtgttcaggcactaataaaaaaaaataattacagaatttgtcagtaaactacgagacattttttaagcctaattaatccgtcattagcaaatgtttactgtagcaccacattatcaaatcatggagcaattaggcttaaaagattcgtctcgcaaattagtcgcaatctgtgcaattagttatttttttaccctatatttaatattccatacagatattcaaacatggtgaaaaattttagggtgggatctaaacagggcctaggaacaaaacgagcatcacatgctgatctgccaagctggctagccctaataatttggaaatgcaatattccaatatccaaagtggacccggcccaattaacccaaccaaaacccacgcccacctcctctccccttctcggctgctcttctccccctccctatcctctcctctcacctcgcaatcacatcctcttcccttctcttctccatcgcatctaccaccgagcgtgcaaggaggggggggggggggggggggtgaaaatggcttcctcgacccagggccaggtcatcacctgcaaaggtaacctcttggttcccctctcttagtatcgtggattcgtggtggtagatttgctagtgtgctagagttggatgtatggttgctgtttcttggagtgttcttggtttgatctggagtgggggatccccggtgtggtggtgggtgcagcggcggtggcatgggaggccaacaggccgatgacgatcgaggacgtgcaggtggcgccgccgcaggccggcgaggtccgtgtcaagatcctcttcaccgcgctctgccacaccgaccactacacctggagcggcaaggtttctctctctctgtcccaccgactcttactcgccgtgtttcttcgaaatctagatttctcgaactcgccatttacactggtagtagggtagtatactctttccaaccacgtatctggtgatggtagttggtgaccgcactggatggaacccgattcatttttttgtttaattagtggattagtatttaattgtcaagtaacatcgttatgttattgtttcaaggatttaggtgtttcttcagattattatgaatgggaagattaaacaattttgtactagaggactctgggtttcttctaggcttctagctagcgttgcatgagttcgtcctatatttttattttccttgactgcaaaatgggtgtagattgatggcaatcatctgtaggaaatcaaaattactggcagaaacctggaagtgttgagtatttctacagtggtctctactggcaagcagtagaccatcagtattctcgtcagtagtagcatctaaaccgttgacttgagttctactagtataatacaatattctaccgccagtagattactgtaccttgtggcaaatgttggcaacattattatataccaaccaaacaggcccttatcaagtgatttacgtgccatgcaggatcctgagggtctatttccttgcattcttggtcatgaagctgctgggtaagcatatagatgtgctaattacatatatgatcatgcacagctaagataattgagcatcgatatgtttcttctgtttatgtttatagaattgttgaaagtgttggggaaggagtaactgaggtgcagcctggggaccatgtcattccttgttaccaagcagaatgcagagaatgcaagttttgcaagagtggaaagaccaacctctgtggcaaagttcgtgctgccacaggggtcggtgtcatgatgaatgatcgcaagagccgtttctcaataaatggaaaacccatttatcatttcatgggaacatctacattcagccagtatactgttgtgcacgatgtcagtgtcgcaaagataaacccacaggcacctctagacaaagtttgcctgcttggctgcggtgtttctactggtaggttcttcattggaggccaaacttttattcaccaattatagttccttttgtacctactatcattttgtagctttacaaaccttacatgcagagctcgttgggttgtttgaatgcattgtgcttgattttttttaccatatttcataaatatggaaagcctcactatatctgtgtcaatgatacctccaaatttccaattattacttttcttttggtacactggatacaatattacataccattgcctcgcacattcttgttattctcttctagataattatgatatattcgtatgtgtatctcacaaattactattgttaggcctcggagcagtatggaataccgcaaaggttgaagcaggttccatcgttgctatttttggacttggcacagttggacttgcagtaagtcaaaatatgtccatgcacatttaacatgttagtctggaaagagagctttgacatctaagattttcattttaggttgctgagggggcaaaatcagctggtgcttctcggattattggcatcgacattgatagcaaaaagtttgatgtcggtatgtttcataatttccatttttctgtttattgcaccttttggttggtagagtaaagggcatattccactctcttaagtatatctggtgaaagcaggcaatccatgtctggtggtgcaacttgctaatagacctttctctcttgaatcgaacctgaaagtgcaaatctacgtattgtttgattatcaacaaatactagaataaattccaaaggcttactatccctttatagtaattcgtttttgacttgcaaaggcagtgatgcaccatcaacaattcctgaatttgccaccattgtatttgtctgagttgtgataggaaagattttgatctgtgatccattgttaacttgttattaccatttatcctcttttgcttgcatgcaccttgctcttattaatcatcacattgcttttcggcatcaggtccagagatcaaacttattattatttgtttatttccgcccatatgcaccacaaatgtgttcttacaaattggatgctttgtatgtgttattgaatgataaagaatgtattacattgcatgagttatttcataaaaattgtctgcaaatcaaacatagcttattttccaactctttttctgctgttattgtttgcagcaaagaactttggggttacagaatttgtgaacccaaaggaccatgacaaaccaatccaacaggtcatagttgaccttacagacggtggtgtggactacagctttgaatgcattggaaatgtttctgttatgaggtctgcattggagtgctgccacaaggtaagctacggctgcagcttttattcggacatctttgtgaattttgtcgcctggtacaaattaatgacaaacttcaaaagaattaataaattgagttgaatcatttggtgcggtaatgtctatttctaaatgaattaatgacatttgatctgaatcatatcttaactgtgttgcattgtcatttggataaactgcttttatttgaaatacagcgtatctgtttttatatttccatttatagatcaatcatactgttttccacccatcacaaagtaaaatattttcgctttcaactgttaaatttctgtgggtattactgtagggctggggaacctctgtcatcgttggtgtagctgcttctgggcaagaaatctctacacgaccattccagctcgtcactggccgtgtctggaagggaacagctttcggcggtttcaagagccgaagccaagttccatggctcgttgagaagtacttgaacaaggtaacaaatcatcactgtctaaactctaaacctgcagaagtttcgtcaatctgtagtgattcatctgaccagaattctcatgtaatccgcacaggaaatcaaggtggacgagtacgttactcacagcatgaacctgactgacatcaacaaggcgtttgacctgctgcatgaaggtggctgcctgcggtgtgttctggcaactgataaatgaaccgatgatggttcatctgcttttggctgtgcttctgagctatgtcacgccaaattgtaatccagatctaccagccttggaaattgaattattctgctcgtttcgcttagaagcactttgaactgtgacaccactctgctataataatatatgtgctgtttggatctttggggatgattgctgttagaacattgccgtgattttgttgaataagcgcctctttgtcatgttttctaaagtagaagttctgcactattaccattagacctactcccaccgtcatatttttgtacacatcagtttttcgcttacaatttaaattttcaaccttaaatttagagtttgtgcttatgcttatcggccacacgaagtttatttttcagtctttgcttttaaatcgctaagaacatgtatataaaaaatttattaacaaattattttttgtttacaaatataccggccaaacgatggagctctatagtgtccagattcaaatgttaggaccgaggaagaacagcacaacaacactagccaaaggttgacgtctagacgattcacattacatgattatgtacgcctagtagagccatggacgttgttcccttttatatctcaagttcaaatcctaggatttatctaaaacagtagagccgacaataagataatcaagattcagtaggcaaaatcgagaatgcaaaattgtgctccataaacttagaatcatttcacctttatgggaagacaacatcacagcattacagtgtggcgcaggatcgagtagtttacatctgtgtacagatacagatatcacagcactcgtaacggcagtgctaagatcaaaaatactattcaactctggtgtcaaaacttctgaagaaacatgaagctgctcttgatatctcgtttcaacgatattagctttgttgcttatcctcaacttgaactttgctgcctgctcacataatggtaagcataaatcacgtcaaaatctaacaaatggcagcaaaaaaaaaaggtgaatagcacattaacatgcaatagttgctatggagtatcaatcaaattaactgacgagtgcgattttgaccaaaccatacacattgaccatgatggcaggagtttacaaacacagtagatagccaccagtggataactcttgcactaccgattgtcacaagaaagatgctcactatgtccaaatccacatagttcaggtgtattattcagagcttaactaatagtcctttcttatctctctagtctatagtaaattaccaagtgcaataaattaacaaattcaatagataactttcttgcattaaggtatgctctatcataaaaaaaaaatcactccaatcttggtcatcaaagaatatatcctgaagttctataatagttctgaaaaaaaaaagaattgattctgcctttatgctaaggacatttcacattgaaaaaaaaaatcaccatgttgcaattaagcagagaattataacacccactaacataacaaggatttccttgttgatttaaaatgattgacaaaacatatagatatgccggtaatattgaaaaattcagaatgtaagagttacacaagcatttcgccccagtatacaggggaaaaaggacagacaaaaaggccacatgtaaactactatgaatttgagtaattaccaatccgaactcgcagctttctctctccagtagagggcttcttcttcatgtagcagctgttccaatcacctccatcctgagagtagtaatccattgggtactcccccccaaagtccttgtcagcacaaccaccattgctgcaaccacaatctgtggaagttcctgatcctgaacaacaaccggtggcatctccactgccacattccctactccccttctcccaccatccaggaacatagcccagtgcaacatcaaactcgaatgtcgtcagcattggcttcttgaatccttcaccccagtcaatcgacaaacgtgggcatgcaatctgcacccacgcatccaccgaatccccaaacagctccatccttgccggggacagctccgacatgagcactactgtgtgttccagccctttctcctccaaatgctccaccaccctgtcgagaacttttacgcttccctgccgcccaagggtgcctagtataactccccaactcttggccttccttgctgccagcaccgcctccttcctcgcttgcttcatcccgacatggtcatactcctccagcacaagcacacccaggaatggatcaaagcggtaggccttgaccccgggattggcaatcatgaatgcctcgaggtggaatctcccgtctgcgacgaacaccaccgctccgaccccctcggaccttttcagggcaggtgctgtgcacccaagaacctcgccggcggacagcggctttgcctgtggcacgacgatgccctggtaaccatcgtgactgaggatctcacgcgctgcgtgaactgccgaaatgaactgcacggtgccggcgatggcgaggcggggcgcatcggcggggtccgggaaggcggcgcggacagcgtcggcgaggcgttgggcgtcgacacggatctcgacgaagacgtagagcacggggaggagggaggaggtgacggggacgaggcaggaatggccgtagtggacgagcacgtcggcggcgagcgccttggcggggcggtcggcgaggcagcacgcgccgtaggtgggatcggcgaggatgaggacgtcgttggaggggtccggctcgaggaagggcgcgaggaggtgggaaagcgggagggagaagaggagcaaaccctccggaagctgcagcgcggtgcggcgggcgccggaggagcggatgcggtgcgccgtcttggggagctcgaagttgtacgccgccgggaggaggccggtggcggcagcggcgagggttgggtcggagaggatggagggcgggatgggcgtgtggacgaagcgcttcgggggcggcttcctctttggtccctgcgcggcgcccgtggcaagtaccagcgagtccgaggtggaggtctcgccggcgtccatggcggcggcggcggcgggtgggagagagcggcggcggcgcgagggtttgcttctccagaaggagagaagagagggtatcaaaggttcacgaaattaattgggccggacacgtgggcagaaagcccaggaaggcaaaaagcccacgcggtccgcgatcgccgtccgcttcgcgctggggcccaatccaacggcccatcgctttcgatccagggaaagttgcgtggctaaccacacatccactcagccgaaaaaagtgcaggccacgtggaagggaggccaactccgcggccattatccattcatctctcagccccaaaatttctcaaaattttccaaaaaagaattttaatttgattttacaatttctagtcgacttgtgagccgggagaaaaacggaggcctccagtttgcttcatcgccattggagaggagagctcatcgggtgcggagaaggggagatcgatggcgacgtgctcccgcccactcttcgtccccgcttccgccgccgccgcctcgccgtcgccggccgcaagccgtcggggcgctcctctcgtacgcctgcacgcggtaactgctcgctctcgcccatcctccatctctgtcgctcctgctatggccgctgctacttttttttttctttttgttcgtaaacatttggacgcggaattgccgatccgtgtagtgtttttatgtggatgggtgcgagtgtgcgacgtgggaaggaactggttgtttcgtgcttccgctgttttttgattgattacctagcttgtagtatgagcgggtgtgtggaggttgcagcctgcaattgctgctggtcaaattatgccatctagatgcatatctcgttaggttgcagtcattttcagtgagtgattcatggagcaataggcgattcttccataagtggctcctaattagtactacctctagtcacaaatacaagacgcttcagacaaattaatcaactaatgtcatatataatcatcaactatttgcttgcttcagatggatatgatgtgcttctgcttcactccccaatcaacctataagctctgcaccttttgcttctgtttatgtttattcattgtaccagtcatcagcaatttaagccattcttttttcgttcctgaactttaggtggcaattgtctcgatatgggaacctcgtcgtcatctgcgtgctcacatgagcctctgctgtaaggcaacgaggaggtccagtggtggtttaactactggacatcctatctccgcattgccgcgggcaataaagagaatactgtcaagctatccttccctgctcaccagcctgggtggtaatcttgctcgaggctacaaggcagccaagcccttcctgtcaattggctttggccgtgtggttttggggatggtgctcgtcatgtctgtatctgcagccacctatacagcaccttcatgtgagttctcagctttggttcaatatgtagctttcattcttgctctatgtcctacttctactgacacttgtgtctaaaatttgttgttggatatccaagcattggcactcacggaggaaaatttgctttttctggaggcttggcgtgcagttgatcgtgcatattacgacaaatctttcaatgggcagagttggtttagataccgtgaaaatgctctccgcaatgaaccaatgaatacacgggaagaaacatgtatgatttttttaatgcttttctttctctttcttggttaacattttctattgcccttcaataatctctgtgacaaaaattacttttatgtgccaagctgaagctttagggtacttctgatacatcatagatcattttattttgtggaaaaagtataaacatgtcgaacagttattaagtaatgattcaaagtgcgcctgtcagtgaggatataaagagttcttccagaggcttttttctataaggctccaagtttacatattatatggtgttgagttctgacagacactaggctggtcgagttaggtgggccaaggctggaggggtccagcatctaaatgggctagggagtaggtagcactttaggttaaaactaatttcagagatcagaaaatctaacttaaatatgtcataaatatgtgagaaatgagaacttgtttgaattttgatgccgttcagtcagtttacttgagcacaactgcatttcagatgctgcaataaagaaaatgctttcaacattggatgacccattcactcgtttcttggaacccgagaaattcaagagtttgcgggtatgaaactcagtctttgattgtcagagaaatcatagctgtgtgtcataaaccgctttttaattcataccattatcttttttgaaggaagtctggctcgcaaggaacactcacaggtgtaggtttatcaattagctacccaatggcgctaaatggatctccttcagggctttctgttatgtcagcaaccccaggaggtcctgcagaaaattctggtattcttcctggagatgtaatattggcaattgacaacagaagcacggaagatatggatatatatgatgcagcacaacgcttacagtaagaccaactactaactatcatgatcagtgtctgaactgcatctgaagtgcgaagttgtctgtcttagattttccttctcttttttttctttttttttttttttttgcattccagtgctacttgagtaagttattcccttacatctttgctaggggtcctgaaggaagctcagtggatttggatattcgtagtgggtccaataccaggcatgttgttctgaagtaagttccttcccatgatccccttgtagatcttgaaagcaaacagttacttttacttcattggtcattgcattgtttgatttatcataggcgacaaactgtcactttaaatccggtaaggtcgaggatgtgtgagattccaggtgcaaaagacaattcaaaggttggttacattaaattgacaactttcaaccaaaacgccgcaggttagtgactttgagtggttctaatgcctttataaaacaccatatatttccagatgttatgtcctgctgatcatattaattgattgtcttctcccaggatctgttaaggaagcacttcagaaattaagggagaacaatgtgaagtcttttgtgttggatctgcggaataacaggttcggacttgcagaaacaggactgtgttacacctcgttttatggaaatctcaacattgttatgtttcacgcagcggtggcctttttcctgaaggaatcgaaattgcaaagatttggtaagcttgttcacctcgtattttcatccataagctgtcttcctacacttctttttttggttcctgattttcctagttatattgaagcatcaatatgttgctcgtggtttgtcaggatggacaagggtgttattgtatacatatgtgatagccagggtgttcgtgacatttacgaggcagatggaattagtacggttgctgcatcggaacctttggtcgtgctggtatgttctgttactgctcaattagacaatgggagatgagtttaactaatttatctgagggtgatggtcttgtctgttacttattcctgtgttgtacctttactattccccacaatacgatcagggatgaatatatataacataccttacatgacattaggatgtcaccttctgaatatgttaggtaaataaagggaccgcaagcgcaagtgagatccttgctggagcactgaaagacaataaaagggcagtgatatatggggaaccaacatacggcaaagggtactgcccttcttttgttttgaacttctgatatagtatctctgtagttttctctgtctgtctcggtatctcactctacttgcttgccaatctccaggaagatccaatcggtgtttgcgttatctgatggctctggcttagctgtgaccgttgcgcgctatgaaactcccgcgcatactgacatagacaaggtgagcattgcgcaatagcagcatgtcaatggcgaaaattttcgtcaggaaggcaagtgtgatcaaggaaaacgaacccttttttaactccagttgcttgatcctgtaaacgctttacttttgtaggtcggcgtgatcccggaccgcccgctgccggcgtcattccccacggatgaagacggcttctgcagctgcctcagggactccaactctgcctgcaatcttaacgctgctcagctgttcacaagatgacgacgccagggctagagaaaggctcaatttggccaaaaaaaattttcgcagtttggactgaccgagttccatcaaaccatgttaattgtttatttgttttgtttaacgtttatctagaatcccaattgtagcttcctggtggaatcatgcagttaaatgtcactgtaaatcatgtttaactgtaaatcattttttcccccgcttaacacttgggaacacagatacactgggaattttacagtattgatcgagaaaattctgaaccccccatatgtaagaacaacaaagatcccaacaatgcagtccaaaaccttcagttgtaccgaagcctcagcaacacagagcaaaaccttgacctacatcatttagaatcctaatggaccatcgctaacccaaaactctaaatccagtggcgacgtgagcttgagcgtcgcaagcttttgatacacgcatgaggaccatctttgttggtcaacacattgtaggccatcatgaacctatagatcgtaagataattgtgattagaacaacagtcatgaatcactgtaacaaaatgatgcagataaatgtatagaggattgacaaaatagacaacacagcaaactagtacagccgatcaatagagaggtggtacgcaaatcaaatggtttcatcagcatgcgaagaaaaagagtgaattcaaaactacttccaaggttattcaaacactggtatgagttttagttgtcttacaagttccaataaattaattgtataggatttcaatccattatagatattagacaatgtgcgtaagatatccttgtttggacccaggggagaaaactcagtaattttaccttttctgttagcaaagtcaccaaatctattccacttttgcaactttcctttgctctatttggcccgtcaattcgcattgcatctcagtccaactgatcgggactagtgtaccacctggagcaacacaaagcagccacattacagaacactactgggaacaattgaaactatttcacacacacacattgcatgatgtatccttcagctaaaaatcaatagtgagtaatttggcactccaatattagaaaacacctaccagttatactttgtgcagaaacaactccgagttcattctgggcagtggaaaggtaatatgcccttgcatcaccaagagagagctttaagatgatttaaggatgccaagccaatcaaaattatcaagtagcttgtcaagactagaagttgatatgtaaataatcacatgcagacaaaatacttataaaataaagtggcttaaaacatacaaatgtacatcagttcataaccaagattaatcaaataggggcaccatattttccccttaaggatacaaccagggctctgacaatatcaccaggtcggtatgactgaaacatatccaccttgtcgatttcagttgcacgaacatcttgctgcctacaaacagaggagcatagctgaaccatgaagaactttgttgtgatagtctaaaaggaacatatggcaagcaggagcattggattgtaaatgtgtttggtaactgactcaaagcgaagcaatacaagagatccctgaaaaaggtttaaatggaagcatatcagcaaagaaaacagaacccgtaccttatcatgccagtgaacttttccttgacagcctttgagtcaacacacattatatctgcagaagccatcctagccataaccttcgtcacctgcaatgtcagccagcacatgcaaaattatgagcagttacatgcaaaagtatctcagataatccctaaacagcagacaattgaccagtgccactaaccaaaacagtgtatacgccaagaaaacaatgatagggaaaatgtgacactaacatcatcatagatcctcaactcaacaagaaaaaagtggaggtgcttgaagcgtgcttctgtaagatctctcacgcatttagtttgtagaaaaggtcaataaagagatgttacaagcagaatgttatgaccaatccatgaaacaatactagatgttgtctagctcaacttataaaatgaaggaaagtgctcaatacatcttgaggataagctggacatcacaaacctgtaacacaatttgaagtcaatatggcgtctcaagttcaagatgacattatgaaacctacactgaaatgacattatgaaacctacactgtgaccccaaatatatacatcaccacaaggtgtgtggtccatctgggtgttggtacacttacacaaaggatggctgtgacatgcagcgtgctgggttttgaaaaaatcaagtgaaccgcataccacctatgccacaaggatgccagaatccacattattgcaatcatggcatttgactagctatttgctggctcggtttcaaaaatcatggcatttgatggctacacgcatcgtcacatccacacaaaatcaacagggtatacaacaataagctaacaatttcacaggtcacacgagtcaaaccaacggtttgctcagagatagatcttacacgcgcaatgacgacgcttcccggctgcggcacagctccatgggccttgtgcccgaccacctccaccgtggacctctgcagccaaaatcgaaccaaccaaccacgcagaccatcagaagaggaatccgaggcgccaccaaatccaaaaccctagctgaaccctacctgatcggtggagccgggaggaggcggcacgaggcggcgatggccagtgatggacgcgcgcacgcagcggccgtcggcgtaggcgccgagccccgctaggagggacgagttgccgaggagctccccaggggtgaccacctcgccgccgtcgtggtccatcgccgtggccgccattggaatttggttgggggaagaggggagaagcgggggaagaggagaggagaggagggtttcggcttgggattcgatcagaaaattgggcctaaaagccttttgaaccacgggccttgtatgttgtcttcgtaatgacaaaatttgcgaaaatttcacgggaactgaacaactttggcctgtttagatctcatctcaaaattttttatcctatcacatcaaacgtttgaacacctgtataaaatattaaatataggtttaaaaaactaactaattacacagattacgactaatttgcgatacgaatcttttaagcctaattgctatatgatttgacaatgtggtgctacattaaacatttactaataacggattaattaggcttaataaatttgtcttgcggtttacttacggattatgtaattagttttttattaatacccgaacactccatacgacaccatatatgatacccgatgtaacacgccaaaactttatacccctggatctaaacaccccctttatgtaaaactctgtataaaattcatgggattcaaaggagctcatggggtgaaaagacaagattaaatccaaaatcccaataattttaatttctcttacctggcttttggagagagaaataaatatctcatctatcccaaaatataagacaatcaccaataatgtaaagaccgagagaaaaatttaatcacctcctcagttatatcacctcgatgcatgcaagtaatatgattggagatttgatggtagaggatttaaaacaaaaccaattttaaggagaaaaagatgttaattaatgtatgcatgtatgcacaccttatatattataagatataaaaaaatataataagatatgaaaaaaaatgattgtgacttatattttaggatgaatgaatggagtatgtgccatgggcaatattataaagatgtgacaaaagaaaaagtgattgtgaatataaggatgaatgaatggagtttgtgccatgggctcaagcacaaacacaaatcccaagcatgggagagatcacagaatctccaatacgcaagcaattactcggaaggaatgctaacacggtaacacctgacatgtacagcctcggcaacgaggggagggtcgaataatcgaattctttaacaacccattacaacatgatgcccagaattctggcaagaaattttcctacccagattacacaaatcagagatgcatgaggaatgaaccgcaaatcgcaaaattagagagcacctgccaaccccatatcctcatttgcttctttggggaggcagaaattaaggcaaatgaaaacatcatctatactggcggtcaccaggattgtcgggaaaactgtacactaaccggaggcaagaatcaacgagaggtaaaagaaatccccccacagcctcaatcccaagtcaactgaagctaacagtctaacactagattattaatcaatggcgaggcagctggccatgctcgctgaagctacctctagaccggtaaaatgaggcaagctttttcttcatccggatgggtcctgatctattctgcagggctggtgattgtgcatgaccacctgttgacaatgcaaagcgggggtcacgcgctccttcgatcctgccagagctgtattccatggtaataactggtagggggttccggttgtcaaaaaacccagaaggatttgagcttctattccaccagctaccactaccgctgtcaagggccagggccccatggtagtcatcgtactggtcacacgatgagtccctgtggctgtaagaatcatcgcaagccgcctccgcatcattgtaaataagcttcagtgcctgcactacttcacccatgaatggcctctgtgacggatcattgtgaacacacatggaagcgatggatgctactttagctacatcatcaaagttgaaattgccattcagagaagggtcgatcaacctctccaaaccctccttatggcatagcagaggacgagcccaagtcacaaggttctgaggaccattggtatcagacatgcatacgggcttccttcctgataaaagctccagcaagacaacaccgtaactgtagacatcactcttcacaagaagatgcccggtcatggcatattctggagcaacgtacctgttcgatcaaataataaattaacttctatgggacagggagtaattaaatgaaattcagcagcaagttacattttgtctatcctagaaaggtgtggtttgtcaaaaactctgcaagagactggtattgttttgacattaaaatagcatgaagaaccatacttggaatttggaaataatcaacaaaattctaagtctatttacaacagcaacaaaaaagaacgaaattaggaaggaagattagtaataaccacaaaaggggcatgatttcaccaaatacaaaagaatgaagattgcgtatcacttttatccattgaaataacaattaatgacatcatcatagcagatggatataagcaaaatgtgccttacccaaaagtacccattaccctagtagaaatgggttgaattccattagttgcctcccttgctaaaccaaaatcagtaaccttaggagtgaaatcttcctccaacaatatattgctgcccttgaagtcacgatgtataacatgagggtttgagtcttcatgtagatatgctaagcctctagctgcacccagagcaattttcatcctaacatcccagttcagcatgcccttagccttatcagcaccttttaaaaaaagagaatcggttagcacaaagcactttgttggcatggctcagagtaacaaatatttagaacataccatgaaggtgagattcaacacttccattgcgtataagctcataaacaagacaccttttgttgtgctcaatgcaaatgccaatcaatttgacaagattacggtgatgtagtcgactgagcatttcaacctccgcaatgaactctcgatcaccactcctgtcttctcttgtgagcaatttaacagcaatctcgtctccaccatccatggtcccatggtagacgcgtccaaacccaccttgacccaacactctttttgaatcaaaaccatcagtggccttttcaagctgggaaagtgaaaatgtctttactgatgttgtgcaagttgccactgttgagagcattgacgccgatgcagagctcaccctgctaacagacaaagttgatctgccacctacattacacataaaagctgtttattatagctggagagtttacattgcaacagtttagtgtactgaaaagtgaaaattttcaaatttgttgaccaaaaagtgaagcaaaagcacatagacatataaaggccgtgagaagactgtctgaagccatttctcatattattctaaatagtgtgtgtagtcaaacatacttcttattgcaacctgagtataaatattttagtttatcaatggaaatgctcaatctagatgtacatgatcatatttagctggcatgcatgcaagaaattcttttcttacaagaggaaatgactctgagaaatcattaaatggtacttcccatgcagacctacatgcaacacatggtctacgagcacagcaattaatgataaaaaaatcggagtagaatattttgtcatgcagacctcttgcaacacatacagactttctgtatggtgcaatttagattttcatccattaagcggtaacagaatcagttgcggtggacaatactatacaaacaatttagtgtttaaattcccactctgcccaaacacactgaaaaagtgcattatacttcaataggctttgaaatagggtgcatcattaaactgaattagcatggaaaaactacgagaaatagggatacttttgagagggtgtgtgggcgggcgggcgggcgggggggggggggggggaggagcaaagaacaatagaagcaatactaaacaaatagcatagtaactacagaaggaattaggaacattgtcataccatatcttctattaactgctggggtagttgcagggctcacagcctcctgaagctgtctaagtttataccattttaatagtaaaaccccaagcccaatgcatgctgctataagtgtgatagaagaccctgcaactaccacaatgatccatgaatctaatttcttgttcttcccatggtgcacatcagcggttattggatcttctccggttcctgttggatcagatccatgagatgtctcaggcagagatggtggcggagatcgcaagcctgtagtgacaacgatgaattagtgaaacatataacttgaggcgcccagacagacaaaaggcaggcttaagaagcaaatattcattgtataggttttacctggataggtaacatttataacttcataatctccaaaaatagatgaattgatctgaatcttattattccagaacctatcagatatcagggaggcagtatagccatcaaactgttctcttagtggcaccaaataaatggtaaccctggtcttctggtcatcctggatacttggaattgcagccatgatcttcacctggctttgtttaagaaacgtcccagctgcaacttcaacttctagttctgctatgcgcatgaatagcaaatatggagctacatccagatcaacaataacacaaataggcagcacacaaccacagggggagccaatcggtgttgtagtcattggatcagagcagttatcagtacaacctgccaaagatacaaggaactattagtaaaataatatgagaaagcatgcaacgatgcaagcataatttagttccaaaaatactcgttgtgaatagcaacacttcatataaagaattatccacagaatgggctcacaataccatgttgaagaaatggaccttagatcacaatcaagcaaagtatatgcaatagggctacaggtttgcataagacacctatacttattggaagataacagcacaacgatacatatacaactaacgaaaagaataatatcaaagtttttggtgtagcagtacaaggatgcatgaggaagtttcctgagcctcaggagcacctaaatttaaacctttcaataagaaaattcaatagtttgatatcgcagataatggtgccatcaaccacacccaaaaaaaaaccctaatctaaatctgatctaaacatcaagaaaaaacaaattctgctgctctgaaataaaaaacaaactgttgctgagctttttttctgctttgtacacaagtcatgtgtgtggaatgacagatgacagcattaactatgttgccaaaaataatcataacttttcaaaagttttaaattgcattgaaaacacccaaatttagatgctcccagagaataagaaacttcctctaggattcatgaaaagattagagcataacaaaccttgtggaaggggagatggggatggcgaatgaggatgatatggtcttctgtggtgcttgtgtgaaggagggtgcaccggaccgcctgtaaaaaataagcagatattaaacagctgatgggaaatataaagttggacattatatgatggatcctgtagcatagaagttctcaaagatacataccagtggattctggagacattgcccttggagaaaatgctggagaaattcggggccctaaaattcttgtatcaggggaacctgatggatgtggagctggactaggcagtgccgtagctggaaaatcaaggtattaggtttgaagttcaggggaaaaaaattgaggcaatgggagaaaatactctacccatcatatggctagcatcatgttaagagtaacagtatatgtacttccaaaatattacttaaagcaggctcaggccattgtacttgggacctacataggcattggtcattggcagtttatgtttctaaaacaagagtatataaagtggaaaagataaaacatcagatcattggtttagattctgaaaatgctggaggttttgcatatgttatcataatgcatgttacacttgttatcttgctacgacacagcacattaactggagatcaagcactagctcaggtggtgcaggattcccacaagcgctcaaaccctaggttcgacgctggtgtttgcctttctacttgaattaaattggtaggatgtaggtacaaatacaaatgtatttgtagtaggactgtgcataccagagcaccagagatatgttacaggtgtgtatgcgagcatgtgcgtgttgtggcatgggttgggtgtgtgcaagtcgtgtgcatcctacttttacctctcaaaagagataacaaaaacaagacattaactgaactgttttcactaaaatggaaagaaaacgtgaaataaccttttgatgctactacttttcaattgttgatacaattagtgcccctgcaaaatatggaagtttacgtgacagttcatatgtctagagatgactagaaagttggttgttaaatctaacatcctcgttcaatatggtgagctgcatttggtttatggtaagcaaatgagcagagaaatagatatcaaattcattacatgtttcagaaggtaccagtgttaacaattcacaaccaaaaaaacaatcaagggagggcatattgtcgataatgatgctagaggagtgggagacaggtttacacttttgtttttattcgaaatgcgcgggaacgtggcgtcctacatttatgtgttaagaaaagacacagacgaccgttacgattcatgtacaagtacaacctaaaaggtcagatttgtactactttagcgctattccgcattcctaatttaagatctcatgcagaactctattggctggttttgtcgcgtagatggcacatgtgctgcaaatacaaattaaattcccatgacgtagcgtaatggcgcaaaccggcattcccatagtcaggtggaatccaagcatgctggctcactgtcagcttctaagactccacaccccccccccaccccagattctcacgtgggtagccttgcaggtggaatcccagaccatacgcacatctccagacgcataaacctaactcaccgacaccatggcaagcatcagagcccattagtagataatcctctggccaaaaccatcgatcacgccaaaatctaccatttctccccagagaacgtgccgctaacagcagaattccgcatcacggcacaaaaacagcacccctcacacctctcgcacacgaccgcgaccgcagaattccgcggacccgagtccgtgacggcaacatcgcggcttcgccacagatctcctaacaaaatgcagcgcaatcccctcgcccgaaaacccagcccgcctagaacctagagcaagccaccaaccccgcctccccaccaacggcagcagaaagcgagaggtgtttccccaaaagtagtagcgagcgaggagggagatggtataccatggagcgtgtagaccgcgccgagcatgagcaggacgaagaatcccccgccgccgccgccgcccatctcgcccggccccgtcacgccgcgctacaccattgcaggaagcggcgcggatctggaagcttctggaagcgggcggatcggcgcggggctactctactctacgctacgcgatgggaggagcggagaggagaggaggaggggggatgtgtgggggaatagcagcaataaattggagcgcatccgcggctgctcgcgttggttgtggtggctgcgcttcgcttcgggcttgtgatgggggattattgatggatggatgcattaaatttggagtggaattaatgagctgctaatcgcggggttaagggggggtgggttggatgagatagatagagaggaatgattcgaatccggagaaagaagaaaagcaaagcaaagcaacgcaagaaaaagtttaccggtgggaggaggcgcgagggaggggaggaaggacggggaggtagccaggtagggggccagcgcccactggctggggttcactgttcctgccagcactgccgcttgctgccccccctgcattacactacttccacagtagtggatgtgttgttggttcactgtggagtgtgtggtatggatggtctcttcggtatgggttttctagctagtgactcgtgaggtttttgatcggcctatgttgtgagggtatgttctttttagtgtctcttcctataatttattagagtaggttatattataactgggtttaactagggaacttgaatcttagatatgcataggttgtttatggagcacattcgcagctattttattgcggttgcaaactaacaggagtgtgtttgtaccttgcctggctgtcactgctgtcgcagcaagtcggcatacgctcctaccgaacaagcccaaagatgatggtgttcgtttcgaccttctacaataaaagattaagaataggtgagttacatatgtatatcgatggtttcaatcaaggcgtttggtttctttaccttgaatggtattcatcaacgtaaaagaagatgttaacaaagggacgaggcatggattttagcgggaaacctagggcattaattggtgacatgctttttttttcttagggtttctttttttttaccaagtttctttttccattgaaatatagattgttagcatactttcaatgcacatataaaacaaatatagaattgtgtaattgcggctggccataaaaagtggtgtggccaaaattttttgtcaagcgtggctacttcatggtaggcgttttataacaacttgatccaatatatgcatataaacgtttctaagactaccataaaaacatagcgataatatcataatagtcataaataaatcagattaaatatatattaaaaaacaatataaatattttaattatcatgcaaaatctaattaactatctaaatgctaaaatctttggatggcgaatggagcaaattcaatataataattatagacgaccacatgcaaaaggagcgtttgattttatactaagcgtgagggcccctgaattaggtcctagtcacatagggacggtgcccatcgtggattaggagagcttgttcggacctttacaatctcatcggcatcgtgacctatggctatgtggttcactgctttgacttccaatcgctatgtctagaacatggcagtgcgatactggtcactggagatggggcgattaaggatagaaggctgaccagcggggcacatgagtggaacgactgcacaaaggcattagcgtgtgactattgcaacaaacaagaggacaaacgagcgacgatgaaatgcaaggacttgatggctcggacgaggtagctaccttagtgttgggttgttgcaagccaatgggatattgagggtaggggttcttcaggcaaaagtcgagggtaatcctgtgtgcatatggttatgccctggctataaagacctgacatttttaacattatcgtcaactttttagggaaagtatattgatatgtatatgcaagggatgtccatggttgttgtagcaatattggagaatagatgaagttgtattccatggaaaatttaaatggtatcatatgttttttggtgttaataattaaaatgttacctttccctagtggagatgggagttattttgttgtattaaggtggaccaaaaattatagattactccctctatttttcaacatatgacgtcgttagcttttggtaccacgtttgatcattcgttttacttaaaagaatcatatgagtgtcgtttattttttgatgacttgtttaatcattaaaaaatcttttaggtataacttatattttttatacattaaaaaagctttaagcattaacctttcaacgtgctgaggtttgaggaccaaagaacggcggtttgaggttggagctggtttctgtatgaacttgacgccttccggaagaggccgggcggtgacggtgagacagctatccggttcagcagtggaacagtagtacagtagacagatgggtacatgcggaatcgtgcaagaaagggtccggccgggagagagagcctgcatgcatgcagcagcgtcagaacgcgtatgcacgttgacgacttttgttgtgtcaaaagcagagcgtcttcttctgccctgtgtagtactagacctgcgtggctagcttgtcatcacggcatgacggtatgcagaaatgcagtgcagtcgtacgtgcagagatagagagagagagagaagctgttcggatgcgtctctctgtgtctctcgttttgagaagatccagcccacttgaaatttctatctcgaggtttcaaatcccaggacaaatgaggcccatgtgatttttttgggccagaacgacagaggcagtcgtagtagtaacatgggcttgcatttgagtatcagcaactactgtggcccaaaatgcccagagaaattgatcactggcaagtgacagcgtgtagtactcctaatcctactacaagcgtccaaatctccctccttccctatccaaaggtgcttggagtggcaatctcgtcgtggcgctgcaggctgcagtgcagcgctgccagtatcagaactgtagtcagacgcagtagcaagggtgacggcgacaagcagcagcggcgcaaaaggtccacccggtagtgtagtgtagtgtactcgatcgtgtgcatcggcacgcccagggcaagcaaaaaaaggcaaccaaagctggagaccctcgcctctgaattctgatgataagtctgatggtttgccatggcaagtgcatgctgccatcctggcaatggcatgcgtggacaatctgacacgcggtacgtatacgcacctagtactatgtacgagatgcacgcattgcatttcattacgccgtactgtgaacgtggtacacaaatattgtgtcgtgtcgtgtacatatgtatgtgtactcgtgctggtcatcaaatcgtcgcaggccgccaagcccggaaccagaccatctttttttcccacacgccatccgttacctccctccgacgcattgctgctggtcctgctggatcgtcaggcttgttgcgagtcaggcaaaaggcgcttatacccttcgtacaaatactagtacaaaatactagtagtagtatatttctacgataacaaggagtacagatacaaataaaaatcaccatttgtacgatgtttggttgtataatctttatatgaactgattccgtgccatccgtcgaggagaggaatatttttttcgtaggactagtacatactcccccataaaaaaaaaaccaaactaagagcatgtttaatagcaggctataaaccagctataaacatattttaaggagataaataaggagagaaaagagcagcgggctatagattgtagtcagctgtagcacgaatttcaagacacagtgtatgtatgacaggtaggaccagatattaatagtgtagtatgtaactattatctgaatgaactattatattggcatagatgaattggagctagtatttggctatactattaaacttgctctaactacgaatgggatgttacatagtactccctccatctataaaaagttacacctattacttttgtcatcaatattaaggagaaattaaatcattttggatgttacaaaatcaatgagtgaatgcaagcatgcaaccaatgagtatttagatgacttctaataaaacatttaatttatcttttcatttaattcttgaatgtataaacactataagtaggaacaatttatttggaaaaactcaaatgtgaaataggtgtaacttttgtggatagatgtagtacaacgaatttaaacatgtcacatcgattcgttatactatgtaatgtcccgtcagtatttaggttgttttttttttaaatggatggagtacagccgttaacagaaacgcgtttagtcacaaaactattgtaaacagaatatggcacttctgcgatagtagtagaagaaataaaaagtacaaatacaaagtacttctccgggagacgcacgcagtcgcagggacacggcgcgggtgcagcgtgcaggtgcgggagggaggcacgtctcgctgctcacgaggccgcaacgcaacgcaccggacacgacgtaccttttcacgcccggcccgacctcgcctagcctttctatagcttgaccgttgcgtggaccccacctccccctccccccagcccactctcgcacgaatctcggcgctatccccaccgttcttccggcgcctcccgcttctccctcgtgtggctcgcaactaggctgggtagctaccaagacgcttacttgctggccctaccaatgtggggccccggtgtcagtgcacaaagtgggtgagaagtagaggtaacaaggcctgcgggtgtggataacgcaaaaacattcgtcggcccgaggttcgcggtggctttgcctaccgcaaaatactgaaaccacgccgctaatcccaagccggtagcggattaaaactcctacgccgtacacacagcaaatgacagatgggtcccacacgtgttctcccattgccctcgaggtgacaatgcttgtgtgactgatgtatatactccactgtgtattgtaggcaggcagctgtagcgacgctgttgtaaacagagggcgcacgacggcacgaagccccggccggccgccggcgatcgaacggtcgccgtgctttccgcggccggacccgcttccaatggccccttctcgcttttcgcggccggacatgcttgccgtacaccggcaggcttatccacttctcgcttttcgcttcgcgccaagcttccattttgcttttctcaaatgtattcacgttccaaccgttcgaatcacgtataaactgaatttaatcaactgatataaacaactacatataaacatgttcttctttaaatgatactatatgattgcatatctctagttatctatgagttataatacctccgtctcaggtacagccgtgaaaatccgtgtccaacgtttgtttatgattttttaaaaaaaatagtcacacataaagtactattcatattttatcatctaataacaataaaaatagtaattataaaattttttcacaaaagacgaacagtcaaatgttgaagatgaatattgcaaaactacacttattttgggacggagggagtacaactgagttgtacctatagcagtattcatatttgatttattgttaaattttatcacgccacactttcgattatcatagttttgttagctatatgtgtttggttagctatcagatgtatttggtattatctaaaaaaacagatgtatttggtttatcacactacacttttggctattgtagtttgttagatatgtgtttgatttatggtcactattatagctggtactttgtagggagccattggtttgcttattcgcggaataagtgaaatggcatatttgcaaataaaaagaaatttatgaataaaatttttatatacgtgttcttagcgatttaaaagcaaatattgaaaaataaatttcgatgaaaaataatcttaaaatcaacttcaaatttaaagttgaaaattcaaattttggttgataagtataagtataaacgaaaatatgaggtctgaagtatttttttttaaacttatctaacttaaggcggtcatttagctgtgataaagtgtagtgtagtaaccggttactccagagcagccaaatttccacagtagcagagcaggctggcagcaaagctgttttctgaagctgccgtttttccgttccccactgtgcattcatttaccactgtattaatccctcccctgtaattaattaattaaacaccttgttgagaattggatattgatcccaagcaaaaaagatcaccactccagctcactgcattcacagcattggaatacactgctcgatccctccgttcgtttgaccgcccaatgcacagccctgtgcgcaactgttctgttctgtactgtaccagccagcacaacggaaacggaagagagctgtcagtccaagcctccaaagccaaaaccaacgcgaagcgaagcagcagagcgccaccgccatttccaccaccgcgtctgagagcttgagcgctgctgcgcctgcgagcagggagcccacctctcctcctccctgacctcacctcccatcgattgcgatgatggagattcctccacgcgcgcctgcctagctcttcgtctccccataaacccttttcccaaaacccctcaagccaccatcctctgtttgaaatcttgagcaagtttttttgtgaatctttgggaggaaaatcgattgggatggcgaaggcggcggagaagctggtggtggaggtggtggcggcgcacaacctcatgcccaaggacgggcaggggtcctcgtcggcgtacgtggaggtggagttcgagcaccagaggcggcggacgcgtgccaggcccaaggagctcaaccccgtctggaacgagcgcctcgtcttcgccgtcgccgaccccgacgatctcccctaccgcgccatcgacgtcggcgtctacaacgaccgcgccgcgtccgggggggtcgccggcggcggcggggcggcgccgcacggccgcaacttcctcggcaaggtccgcgtcccggccgccggcgtgccggcccccggggaggaggtggtgccgcagctcttcacgcttgagaagcgcagcctgttctcccacatccgcggcgagatcaccttgaagatttatcgcaccaactccggggaggttgtcgtcaagtccaagccggagaagccggtgaaggcggtggtgtcgggcccggaggtggtggccgcgccgccggtcaccgggcccaagaagcagcagcagcagcagccggtggtggccgtgcagccgccgcctccgcagccggaggcgcccatggacatcctgccgcccccggccccggtgctcatgaagccggtaatgctcgccgacccctaccccgcctcggccgtgttctccggccccggcgacttctctctcaaggagacgcggccccgcctcggcggcggcacgacggccgacaaggcgagcgcgacctacgacctggtcgagcagatgcagtacctgtacgtgcgcgtggtgcgcgcgcgcggcgtggcggcggtgggcgagaccgtcgcggaggtgaagctgggcaactaccgcggcgtgacgcccgccaccgccgcgcaccactgggaccaggtgttcgccttctccaaggagaccatccagtcctcgttcgtcgaggtgttcgtgcgcgcgcgcggcagcgacgaccacgtcggccgcgtctggttcgacctctccgaggtgccgcgccgagctccaccggacagcacgctcgcgccgcagtggcacatcatggaggaccgcaagggcgagcgcggcgccgcggaggtgatgatcgccgtctggttcggcacccaggccgacgaggccttcgccgaggcctggcattctaaggcggccggcgtccatggctacggaccattgggctccatcaagtccaaggtgtacgttgcccccaagctgtggtaccttcgtgtgtccgtcattgaggcgcaggacttgatccctatggacaagggaccaatggcgattggccggtatccggagctctttgtgcgtgcgcaggttgggagtcaaatgctgcgcacacggcctgcgccagtggcggcgaatcgaggaccatcaagcccgttctggaatgaagacctgatgtttgtggttgctgagccatttgaggagttcttggtgttgtctctggaggatcatgtgtcaccaggaagggatgatgtgcttggccgtcttgttgttccagtatcctccattgagaggcgctgggatgagaagcttgttgtctccaggtggtttgggctggatcgtggcactggtggtggcaatgttgcaagtggcaatacaaataggtttgggagccgtgtgcatctccgcttaagtcttgatgggggataccatgttctggatgaggctactgcttacagcagcgatctccggcctactggaaagcagctgtggcagccacatgttggggtgcttgagctcggtgtgcttggtgcgactggattgataccgatgaaggcccgtgatggcagaggtgcaacctcggatgcatactgtgttgcaaagtatggccagaagtggatccgcactcgtactgtcgtcgactctgtatgccctcggtggaatgagcagtacacatgggaggtgtttgacccttgcactgtcatcacggttggtgtgtttgacaattgccatgttgacaagccagcttctgggaataccacattggctgtccgtgataattgcattggcaaagtacgtatccggctttcaacattggagactgatagggtgtatacacatgcctacccacttctcatgctgcatccatcaggggtcaagaagatgggagagcttcacttagctgtgcgcttctgctgtggcaatgctggcaacatgttccatgcctatgtgcgtccgctgcttccaaagatgcactatattgagccactgcttgtgcgccaggttgagagcctccgctttcaggctaccaatgttgtagcagctcgccttggccgtgctgagccaccacttggcagagaggttgttgagtacatgctagaccaccgttcacatctatggagtatgagacgcagcaaagcaaactttttccgccttgtcactgtactctctggaccgatcactattggcagatggtttgaacttgtccgctcttggaatcgcccggtgcattcatgccttgctgtattcacattcctggtgtttgtcacaatgccggagctgattcttccgacggcattcttggcaatggcattcactgggttatggaggtaccgtgtccgctcaaggcacccgccccacatggagatgaggttgtctcatgcagacgcagccactgtggatgagctagatgaggagtttgacacattcccttcgagcaggggagatgttgtgcgcttcaggtatgaccgccttcgcagcgttgctgggagggtgcagacagtggttggcgacatagcaacacagggtgagcgaatgcaggcccttctcagctggcgtgacccgagggcaacagtgcttttctcgatcgcctgtgtccttgctgcggtcattgcatataccattccgatgaaggtgctggttgggctctggggcctgtatgctatgcgtccgccaagattccgcagcaggatgccatctccgctgatgaacttcttcaggaggctgccatccaaggctgacagccttctctgatcctcattgttgtgcagctgtagctaaccttgtggtctgataggtgattttggcccgaaggagatgcttcaaaggaatctaggaagaaacaaacttgcagtaggttcaggttgcttgcttgcttagtttaatgcttttaggtaatgtatgcttctctatgatgcaacttatagcagttgcagacttgttcttgtgcctttcagttccagttgtgcgaaaaggctagttgtgatggtaatgtgtaatgtggtgatgatgaattaatcaagttgatatttgaacttgtcaggaggctatttacctctgtatcatgttctgggatgcaactgtcaggagtgcattgtggctcagtactagtaccagtagtagatgtttaattggttttactattagtacttgtgttcttaaacaactctatgatggtggtgatgcttctcacatgtgccgatgtgcgtgtggcttttgtggttagagttcagaccaaagctcttgttccttttgtttttgttttgtctccattctgttcccatgtggctgcagggctcaaaatattggaagaagggattgttcccggtttcaagtctaaacaagtgtttttgttatttgtctgattggttcaatcgacgttgtgcagtgagctgctgcatgatgcaagaatgagcacgctcgtgggccgttgcttctactgcttgtctgcatactgaataattttatgttcatttcgtcttttgaagcgattaaagcaaaggaaaaaaggttaggagaatgtctagttctgctagtaccttttttgttcaaagtttcttcttgtcttggatgtgccacatgtttgcatgtttggtttggtttcactttgtaccattggaagatggagctgcgtgctcttctgactgaagatgaggaccacagcaagaggcgacccgcgaccatggttggcagacggctatctgctctgttcaaactgcttggcttctgtctgacctggagtgggtaggcatgctgcatgccatgaaacaacaaagatccaatttgttttctcctgtttggctcatgtagaagcagggcacaatctgaaaaaaaaatgtattgagtcatttgtgctaagtgaacgaactgagggcttgttcagtttcttgctgaaattaacattatcaaaacttgacaatgctaaacttaaaaaacatattttagcattgccaaattttgataacattggatgtattcagtttgttgcattatcaaaatttggtagtagtgtttgtatcaaatttggtaaaatggcaatggcaagagttgtttgtttagtttgttaccctaacaaaattttataacatcaaaacaaaaattttgatcaagcccgaattcaccatagatgaacagatgaagaaagagtactagagtcatcagtttatgggggagtttgtactgctcggacgtgtgcttccccacgcgcagttcatccccacaccgccgcatctcaatgccggagaacaccgttcatccggtcgagcggtcgccggcgaggaaacgaagaggactagctagggctttcatcatttgttgggctgggccgagtgattcgggggcagcttgctctcggcggcagcccataatttgtaagttttacaagccgtcctatcatttcactacgtttacacgtacggtttattagtaaaaaaaataacaatctggtaaaaagtaaatgctgtaaaataaataaaacgataaaaagttcacaaaattaacttcaaatttaagttttaaaatttaaatttgacttataaatataatcataagtaaaacaatgggtttgctccccaacacgttgggcaactttggagaacgggactacgagtttagttcagggttcacaaaaccagtggtaactgtgtggttatcgtgcttaccgccgggtacgataaagataaaaccgtggtacccagttaaatttaaataaatttataaaataatttaaatttttgataaattttatacggtttgttacggttaccgtgcttatcgtcagcgtgcggtgacctgcattctccgacggtaagggaaaccctagtttagatacagggaaaactctatcatctaaaccagggtctaattagtcgtgggagttttctctctttgatttttatccccatcctcaatttcttgtttagtcaggatgaattttgatgagagttagattttttagtgatgatggatggctcatatctaattggttcatatatgcacacgtaacgtaagagcagggcacattctgaaatttgatcaaaccattgtgctaggtgagcgaacacgaattcacagagatgaacaaatgaatgaatatgaaagatggccacagataaaagattctgaatcacccaaatactacggcaaattctgccagtcatcgcgagggttgatttttgtctataacagaacgcactgtccgtgccacagaatactaacaggtatagtggacaggacatagtgatatacatcaaaccggctgacaatgaacgatgaatcattttgagggcaagtggcaaaatcaaactgcaatccactttggtggagagcataatcttcataggccgtaagggtttctggtacttgaaacaccactgatggaggttcatagtattaagacacaggagctgggttccatgttagatcacagataactaatactttcctgtcagattctactctctgaaaccaccggtgccaaatcaaaatgctcttccagcacagagaatacttcggaaagcgaagaaaccttgaagtcaggtcgaacaccttcaggcaaagaatcatggggaccgtatcgtcctgtttcgtcaagcaagcaagtaaaagctcctgctctcttaccacagacgacctgcacatgttttcagtgaaaactatttcagaaacaacatattagcgtccataagctactgaagcatctttctgagttcagaaaactgtgaattgtgagctaaaagggcattgtccaataccctagtaacttagcttatgcaagtattacagttaaggggcatataaaaaaacaacactagaacaatttagctcaactgcagactgaaattaaaaccatgggacaaagcaaactatttagaaacaatttataaagaattcttacatcatccttgaggctatcaccaaccatgaccacctcatttggtggaatattccaagtggagcaaatatgaagcaggggagctggatctggcttataggggcggaattctctacttaaggctggagaaaacatcatctgcagaagagttcagatgtccatagttagcatattgaagataaatgcataactgcaacctttggctgatagctagcaatgaaccaggtcgattgagtgtatgagaacattagaagacagttatccagaaaattcaactcagaacattatataatctcttgaattcagcaaaacacagggaaggcttgacaaacatatccaataaaaaaacatgcattccgtaatgtgtacccaagtataaacaatattcaataggtcagagcagtggaaactatcagacatgcatgaacaatagaagatcagaataatacaagtgcagcaacttacaccaaacctttggtgaaacaaatcaactgcggtcttcacattgcgggtgattaaacctcttctgaaaaatatagagggtaggtctcagtgccgcactgatatcataagggttgctaatataatgaggtaataacagagaatacagttaattattgttgttatttatgtgtggtgcataaataattccgctgttttacaggatgataacagcgcatactaaacaagcatgcataggcactacaaggaggctgtttcagatcaatccaagaatagaggcacaacaaaaatagccacatgatttatgatctagttaaaacctagtcacaaatcaaaacacaacattttgatacatggtgtattgatatttattgatcctagaagtcattaaattgcgatgtatgcatatttgaggttgatagagcacatgagctcagcattgtgagaacaagaaaattcctttattgcaagagaaaaggaagatgatgaacagagataaactgtgtatcaattaaacagcaaaaaaacagagggcagtagtatattgaactttacagccatacagtttcccacctacactgcagtcaaccaatgaccaatagctccataactatttgtcaattattctgacatatagcttgcatatttatcatctgttcaaatttcaggaagcaccgctttaattcaaacaacttatctaccaggtgcagcagcaaatgtacaatttgtatagtttgtccggtctccagaattggtttcttgcacaaaatcaatcttaagaagcaagattaattcagctcaaactggatggagtgtatagtgcatagatacatttagccatttaggaataagaactgggaataaaaactgggagctctaccgactaccagatgatacaggcaagtgcatcagcaattgtacagtttgtagtttatccagaactagcttcttgcaaaaaatcattcttactaagcaagatcaattcatttgaactaagcatcttgacgaagataaagaagcacattgagctacatttctgaaccaaagtatcagaaccggtggctctaccagacggggcccaataagccaagaacgctcacctgatctgctttgcgtccaggaacccgcagagctcagaggcacctgcaacatccacccaaattgcgacctcagtagtcctcagtaggttgagaaaccaagatagcactgcacagccttggcattagaaatcgccatcgaacgcatgccaagaggcttaccgggcatgatctggaggcggtcgaggccatcctgctcgaaccgcgcgatgacctcgtaggcgcggcgctgctcgtcgggcgcccagccctcgatgcagtggagtatgtcgacggagcccccgcccgccgcgcgcgccgccgcgtaggcctcgtccccgccgagcacctcgcggtacatggccgggaagtcgatgacgggcaccgtcagggtcccgtccatgtcgaacaccacgccgcgcagcagccgcgtccccggcgccgcggcggacatggcggcggccgtccggcggcgggggagaggagcggcggcgccggcgaggaggcggtgggcgaggagcaagcgggggaacatacgtggcgcgatctcagccgctggattggattcctccgcggtgtgtgtggcccgtgtgtgtggtggtggtggttggggactcgagcccactccgcctcttagggggctaatttgcaaaatataaggtcctatttgcaaaatattgggaatattctgatgatgactttttgcggtaagaccctatgaggggttatatagtaaaaccgttgcgaacagggttgttcctgcaaaaagtgcagacgcgatgcgaagctctccctctcgcgcggccatggcggccgccgcatccgacaacgcgaagctcgaatccttcctctccaagtctctgattctccaagtagatcctatccctgcacctctcctccaactccggcgctctccagcactaatcttcccggcgggccaacggcggcggccgtacgatccgcctctgccggcgtcttctctaccgctgccgatccatttcaagacctaattatctacctcatggaatttgttggttactgaggacgagcttgctgaactagaactgcatcctctgctactgtaacgaaggtacatatacacatcgtcactggctcactgcaactctctggctttcagatccatggggtccaattcatgcatgctgtttatcgagtacacaagtgtaaaatcatcagtggagatgaacaagccgatgattaatttccagtgccaactctgtacctgcattgcaaatgctaacaacgccgcggattcattttcggttggttctgaagaactggttggttgcagacttacagttcatttaattcgctcctctgttcttttttactgcataatgaaggacatttaattcgctcctctgttcttttttactgcataatgaaggagatgagtactgcatgagtgattggggttggtttcattttactatacctcttttcggaggctactgaatgaattcttcagcatggcatgtactgtttttaattaattcggtctgtctcaatgtgctagtaaattcagtatcagtaataggaaatgtatgtgtgaattttgcatttctgcgactgacagttaagcagaaaaaaattccttaattctgaaagattaattaaaaacctatcaataatgatatgtgattcaaaacaagaacaccacgtacatacacaacacagtacatatgtaggagtaattaaacacactagctgatgagcaatcgatctgaccggatgatgatcgagctaagctcaaatatggtttatgtggacgctatatatctagcaaaaactaaaactaatcacggacgtacgtagagtacgtacgtcgaacacttgaaaaatccaaatgacagtaaattacggagagagatcaatccatcgatctgacgatcattctgattgattgcaataatgcatgcaggttgtaatcatggtggcgagatattgatcagttgcggagttgagcttgttggtcgagcttgaggatggtgctgaggttcatgggggtgatgtagtcgagcgagccgtgcatgaactgctgtacgatgaggcggttggcgcgctcggtggggtggaaggcgtcccagaagacgtacgagtcgcggtcggcgcagaggttggagacgagggtgcagaggcccatgccgttgaacctgccctgcccgcagcacgcctccgtggaggtctcgaacccgtgcgccctggggtcctcgatgaagtcgtcgtgggcgcgcttggtgttcacgccgacgaacacgtcgccgccgacctccgcgttgagctccgccagcatcgccaccagctgcgggttgtacgcgtccgccgcgcgctgcagctcggcgtcgcacccgccgtcgaggctgtgcagcgcgagctccgccggcacgcacccgatcggcccgacgccggtgaccagcacccgccgcgcccccagcgcgtggatgtgccggagcacctgcttgtactccgagaggatgtaccggatgtagtccggcagcgagaactcccgcgaccgcggcgagtacgggatgaggtagtagttgttcacgaagtcgttgccgcccagcgtgatgagcgccagcgacccggcgaccaccttcttcgcctgctcgtcgccgaccaccgcgcgcagccggtcctggtactgctcgaagtacctgatctgcttctcgatgtggatgatgttcgcgaactgcacgccggtgtcgttcaggatgccgatgccggccgacgcgaagttcgcgccgacgagcagcctgtcgccgtccagctccgggctcaggtacggcaacaccggctcagctcccaggtgctcacctgcatccatgaatccatccacattatagctaacagtcttgttctaaatgtgaattagcttagttgattagtactagagtttatatattggctgcatgctgcttaactgataatgtcaggcatgttcttgccattggagaacctcccggtggcgcggtggtcgggggtgtcaatgccgtacggcggcgagtcggcgcgggccgacgtgatgaggtagttgttgttgccgttgtcgacgagggagtcgccgaagacgaagaaggcgcgggcggcgtgcgacgccgggagcgcgccgatgcagagcgcggctgagagcagcacgagccatgacgacgacgacgacgccatgaatgctactactgctatcactatacactacgtaagtacgtgagactcaataaacgcctgttgctctctcactgatttgctcctcgccatgctgctgctgccttttatagcgcgtgctcgcgtcgctgggggtgattagcgtttatggatcgcccgtactactgtccgtgtgttgcatttctctggtaattttgtttctttcactcggattaatctctattgagatgtgtacatttggatttctttttgcagcttctggtgttcttgcttcgttggcgagtgacatgaatgagtttgatcagttaggtggttaactgcactggtgtgaacgattggtcaatctgttcccttgactggatttgaccatgatgttttttttaacttgacagttcttactcgatggtaatgctttgccacggtgattagtacattgtattcaagagggcagctggatctatcatctatgcaacgatgcctggatttagatgagctgtagtacataactagctctaacattgacggtcagcagtaacaagatctggggtttgagtagtatgcatcagcaacccacatgcagctgttttcttttccctgcagtgtgatcatacgtacaattcaatcagtgattcagtgccacctcaaaaaagatgcaagtgtgtagtgtagcacattacaatagaccacctctgacagcaagtgagtttattcattgcagaaaaactgtatcctttaacctttcttctttattttcagctctcatttttatgacctgatacaagtcgctacataccctttgcttaatacaaatatacgcaaagcttatgctgttcctgcatttttttttaaaaaaaagctattacatatattatgtatcctctttgttttagccgtactgctgctgcctaccacctttgttcagataagctactactaacaagctgcaattatattctgtttatggatactttttcatgtttacactccagcatccatgtgtacattctctacctattgaatatactctatgtacagtttaacctggcaatttctgctgaatatctatctcaggatctgtaccatcttcagtaaaggaaaatataatccagaatgaaatgaaattggatctgcccaagcagtaagaggggacccttgcccaccctcaaccgcgggccgcatttatttctgaattcaggtacatgatcgagcatcttctttcctgtgattgcgcatggtaaaatctagatggtaccatcatgaagattcactacttatagtttgcctttctcatagttcagatgaagtactcagctagtaactatagtgtctggcaatactccgtccaaaaaaagaccgatcctgtccaggtttattgctagattggttttttttttttggggggggggggggggggaggggtaagctacaagcactgttggttcaggaaaataaaaaaagaatacgtgagaaaatacatacatgtaaaatatgtttgcattggtgaaaactgccaagttacaaacactgtaggttctgaaaaacaaacaaaagaaaatgtctctaccgtttgatttaaacatcggaaaaacaaacaaaagaaaatgtggtgtggtcattgttgttcccttgttttaacaagtgggagacatagaactactctaacattaggaatgacctggctgcataataacataaccagactcacctccttctggaggccattgaattctgatgttccctggacaggaggatgaaaacagattgacatggggcaaagccagtaggatgagatctaagctaggaggctagttaaagtacagaaattttgacttcacatgcttcggttgctggagtgaaccggttaagcaaagtacagtgactgtgattcttgcagtcaatctacctgtcctggtttttactgctgataaaacctgcagataggcagtatcttgcacctgctcatcaaatcttcattatttactgttctagtacacattaatatttatgaacacttatgtgtagtaacatgaatgcattttcaaaactccatttttttgcatgtactaacatgattcgactgacgaattgatgccatatttttcatgaagaggtgtctgaagtcatctttctccttgatacgcaaacgaactccgctgtttttaatcaagagaacaaggtggagctctagcttggagtgtatttgatctcatgcgactctaatcaatgcgctttgctgttgatggggatctgcagatatgaaggctacagcgatgcttctcgatcgatgcttttgttcttaatacatgtcaccttcagggcgatccaaccacggcaaattaatcatttgatgatggatactacactctccaaatgcaactaagtcgaggttgatagggtgtcactgtctcacgagatccctaatgtacatataatgctctgatgacagtgatgttggggaattaatgggaactgatatatcttaatcatggccacactactcttcatagacaagctatagacagtactgatacagttggcctatggactaatggagtatgtcttaatgcaggcagcaatgaagcacgcattaagtttgtctagcactgttaaattaatgctaattaggatgcacttggagagctgtttccagtgataatccatgccatgccgccctactactctactatgtttatgcttgtataatgaggttaactaacgtggtgtatatatgcataatatcgtgtaattacactacctaccattaggggaatgttatttggataatactgtagctagctggagtgttaggctgcagttaactgttgcagccatatacagtaatggtgccaagttaggtaggtagccatgaatcattaactgttgaagttaattagtagatggagtacatgcatgtctcatttcaaccactggtagtaaattaggtggtgtttacatccagggacttaactttagtccatatctttagacactaatttagagtattaaatatagactacttacaaaactaattacataaataaaagctaattcacgagataaatttttttaagcctaattaatctataattagagaatgtttactgtagcatcacataggctaatcatggattaattaggctcattagattcgtctcgcaaattagtccaagattatggataagttttattaatagtctacgtttaatatttataattaattttcaaacatccgatgtgatagggacttaaaagttttagtcccatctaaacagggccttagttactccgtatcgtcgatcttaattattattaaggccgtattttatgttctgtactgggtacttctatatcattacgtgtgtacgtggtaaattaatcgatactcctgcataccggtatatcaactctagctagagtctaagttaccgttctgtctatggatcatgtgcatcacagttcataagctacaatttcttcttatcacattttctaaattactagagaacttgttctaaactactccgtatttattattctataatatacaatatttagttcaaccctataagcaattgttcataagctctgttcgcttgatctatggcaccaaaaataatttatgggcaaatttatatacatatgttctttggaaaataaatcatgatgatttttttaaatcaactctataaatcaagttttaaaatttaagttagctacaattgataaggaaaataagcagacgaggctaggagagacctaatatgttcaaccatctataaagactgtcttagtgttctttacttttttttatcacttggagatagacggtaaatggagaatatagtgcaaagcctgtttaccatttccaattcgaggatcttcagttgacttgcaatataaaatcgagcacggacagcaaataggtcgcaaactagggggtggccaaacaactattttagccttcggaaatcttgaaaaaccatcgaccactcgttgtttgaatgcccaatctcaaagcaaatctaacttggtgtgcttcaatggctacggcaagggcatatcatcctgagatggagcacccataggatctgctagactgatggacacaggtataagcaattcagaagcaacaacatacaaatgactcaaaccagtcttcttgctaattgcttaggaaatctggaaagaaagatatgtgagaatcttcagaggaaaataagcgacaacccatcgaataatcaatcgaattcaggacgagttgggttgttagagcttgattggcgtaaatcacatagcgagatagttgccatgagaaataaggtgggctgagagtgcaagcatgtttgcaattagaaatgtattatttttccttttctttcagctcttgttttgtacttaaacccattctaccaatataacgccaaacaatctgtttggccgtttttaaaaaaaattctttacttttgacaaaaaaaaaagacgtagtagggtatcttctattcgacttctataagaaaaataagaaaaagacagtcttagttattgcctttttttttccctgaatgccttactggagtataattactgtatccttcattccctttgtgactgtagctgtacttgtacttgtacggcgcggatgatccctcggacagtgcggcgacccgttttaccggctaggatttattaaggccggccaacacgtggctggctctgattggaaaatgggccatactgtctttaagctcaactggaccggcccacttttcatgcatactacgatggacttgtggtgcagcgttgggccgacacggcccgtcataaccgatggcccaatcctaattcacattgggagtcttaagcccaggtggttagttggttgggcttatcgttgcgttcaccggcccagcccggttgattgttcagcctcactgctccttcctcttcatcagagttcatagctgttcgaagttcagagctacatccatcgagatcaagagcgagaaataagcccttctttatgaaagcttctggcagctataaattctctgagaaattcaaattcttacctatattttaaaaattagtaatttagaaaatgaactaacagcaagaaaccaagaaacccaaatttcctaagttcttactagctagtcatcgtgtactaattctctgaatctctagctcgtcaagagggccacggctgaactgcaagtcgcctgccgttgtctgttgatgcgcacgtacgaaccgcgagtgttccagcatacagtgtactatcgatcgttaactatactggctttacatcttcttctcttctcttctgaagatggtgtcagcatcgccctctgtactgttcaactgtacatgagcagcaatgcagcatgcgtgcttgttggtcagtcaggcatcacgctcgccggggaattcgatcggcacgcatgcatatccatccgacgatatgtcgatcggattcgacgtcgtctgtcagtcgacggcgacggcgagcgagacaggatcacaggaggcaatgcaaataggagtatatgcaatggatggaccagacgtgtgtgtgtgctctgctgcttgttaagttcacgatcctgtctgaactctgaactctgaactctgaagactgagatagtacgaacgtcaggttcagatatgatcgacgagccggccgaccggccgttgctctttattcagattgatttccttttgctccgtgcccactgatttcgtttaatttaactgaatacgactgcacacttgcagcagctaacttaatgttcagatttaaggtctgcaattactggcctggacatgcataggccagtgatggagccaggaatttgacgataagggttctgacagtctcatactaggtgacagttcaacagaacaaacgggcagcggcataaaccaaacgaatgaagaaaatggatcgaatgatcaatggagtactctagatgtcatggagattttagttatatgattcaagctttctccatcgaatgatttatgattcaatggagtaattaacatcgtgctcttatgtattactccctccatctcaaaatatatttgttacattcatccaaaatcccttatattttaaaacggatggtatataccgagcattttggcaatcctttttgggtcctcactgcctcctccactgctacacatgtccatcaatgtcagctcatgaattatctcattgtgatcgtctgcttggtggcttctcagccaaaaccaactttaaagtctagaaaaagccactaagcctagaaaaagtatgtcttaatgtagggtatgtttgtcttttcacattcatactaatatgtcaagattagcttaaaaacaaggtattttaagaacgaagggaatagtgtacagttttgagttttaaatcactaataagtaataatacaaatataaatgtttttagtcatgaattatttttagtcagttacttcatttttctccttgcattgggcgttctattgctgcagtgatgttgttggtcctaactcctaactccctatagatagaagtcagctttttcctcttatattagacagaggcgatgaaggttgttaagctgtccccgagagatgaaatgaaagaaaaagactaaacatgtgagtgtgatatccaaaaacaattagactcacggcgttgtcttggcacctcagaacaatccagtgcaataactctcttgatgtatcatctgcaacagtcgattgctgcatgccaccgtaatagtatatgtttgtgtcctaatgtcctatgaaaagtggcttgataagtagtgctaattaattggtgtattgtctaattaagtgaaatgcttcgtacgtttgtgttatatactactttctccgttttacaatgtaagtcattttagcatttttcatatttattaatattgttaatatgaatgtgggaaatactagaatgacttacattgtgaaacggaaggattactccactacgaaagattataagtttgtgcaatacaagttgccatgtactacttggcacatttgacttcattacaactctaaataaagtcacttcaaaaaaaaactaatatacttgtgtacagcaaacatttttatatgtttattaattcaacatcaaaataattaacagccgttgcatgtctgttggaaccattgagagaacttaaatacattgctatcttctggagtataaacaataattaatgcatcattctttggtcaccagcaattccgcttacacatcagtaataaacagttaattcacgttcagtctcaacaattaccagattaaaaaaaatgatgtaatcaacatgatacatacttacaaaaatacacttggtagctagcctggttgttggggagtagtatcaggacttcataaaaacaacaagagcttgcgttatcctctgaaaaaagaaaacgagattataatgtaggtattcaaattcatctctcagagcatgcaatgcaagcataataaaaccagacgtatttggtataccgtccaggacaccgtataaatactagtataagacatcaacacgcatgctgaactgaatacgacggccggttggtacgtacgtatacatccatcctacaagtatgcacagttgtcgatctcaagactttgaagtctgaagtctgaactgatctctgaatcatccagatctctatgcatatggtccatcgtccatacatggatgagatctcgtggaagtctataggatcgattaaggacatgcgaaccactacaccgatagaaggggaaccattttgatcctcgaggggtgtctcctatttatttttcgcgaaagtgttctctatttattaaaacaccattcaaatagttttagaaaattctttaaaaaattaacaatatttataattgttttatagaatcttaagttgaaaattaacccacccatcgggatataaaaatcataaattcaacatgtataacagcggtacacaccagatttatcttttttttctctccatgtgtaggttgaatttgaacttaattttttttagcagagaggtagataccatcatactttatattgtcatcttttacaactatttacattaaatttagagaaaagaagtatataaagggttacgagaggataatttatggagggattagaatccattccgctagctatactgacatttttaaaaaatactagctatactgtcctgaaattctcccctgcagtcgctgcgaatacagaattgcgtggtctctgcactgtcacgagtcacattttgattgtgccaattgttggatcagtgctagctagcgagcgtagcagccagcagtgttgacgcaaacgcactaacggtccgaccggcgacaggccggcggctatacatccaagacattctgttccaaagtcagagtcgcgatcagctgcaagcatccgccaggagccaaatagtacatgggactacactattcgctgctaccactagcaagccggaatggattaggccgagttctttccccagtttttccaactcacctcactcatttttcacacgcacgctttttaaactgctaaacggtatattttttgtaaaaagtttctatacaaaaattgcttaaaaaatcatattgatctatttttttaaaaaaaggttaatacttaactaattacgcgataatgggtcgctccgttttctgtgcgcaggagatgggttcccaatccaaatcaacgaacacaactaggcatattttagagagcttctagccaatacagcttcttccagaactagaagctcttccaaacagttcagcttttgatacagatacttagaaactataactatagttatagaatcctgaaaataaactagaagccagaatctaggaaacccaccttttccagaatctctgaagctagctactatcttcatcctaaaatacttgttgctttgagtttttatttgtaacttttgatcattcgtcttatgaaaaaaatatagaatttttattttttttatttatgacttgctttattatcaaaagtaccttaagtgtgacttatcaactttttatatttgcactaattttttaaataagacgaatggtcaaacgttataagaaaaaattaaaacgaccactaatttaaaacggatgtagtactaattagttatttcttgaaattttaagctcttcaaacagataaagagcagagtcgctgcacgcaggcagagccatgtacgaaagcttcgatcttgtgcagtgcagggtagatgctgctcgtttcgtttgcctgcttcggctgctcgcatccacgagaggacggcgacggctcagcgactcaccggcaccgcgcgcattgtgcgggcgaggtgaggggatccattgttgctcgtccgatcgagcgctggacctgcaggttgatgtggctgtgtcaaccgatcttctgggtcagggctacgcttgcgtgtaaacatatgcagacaccggtgcttactgtacatcgagtgtacgtaagtatactgtattttttctctttccgattacacaaaagacgcacacgcgtacacatcaccgcacacgtatatcacgttcaaacatccacgaatgtgtccctaacacacagttaaagagacggaatcatatgcgtgtatacaaaaatcaggatttgggaatactacgtccacatacgctacggcgactacacggtaggggttttccagctcgttctttttcagattcagggtccattaattcttttttccaagtcattttcagtctcagagacaaaagcttccagtgtaggttcagtcatttagagacgttatatcaaggtgacatatactgggattctcgatatgtacacttcctctcaaatcttcggatttccatgattcactacatggctagatacatgcaaagttgtgaactgcgcaacatataatgatgaataattgaatatgcatgcatgacgaaatgcactgcttccttttgcatttacaagctggcaaacattcagacttcaatcctagtttctgtccgttgctaatgtttttcgggaatacgcaaggagcgcattttttcctgtccgttgctaatgtgttaaaggacttgcagaagtcgccgttgtttatcttattcttagcttaattttggtcttaatctgacccgatgcatagttcgttggcttctaaccaccttgacccaacaaacaatcagtttcatctgcaaattcaaaatccatttataaaatgcaatcttatttaagttctatctctgtttgttagaaacagagctatatttgctgatcactagcttattcctgatggctgaagttgtacaattgcaaacttaatttgactcagttacctgaagttctttttcttaaaaacttaaatactatattcagagcaaaccttttggagaccatgaacatatggtttatccacctgtgatggatgaactaacacaaaggtcaagacaaagctctgaaaggaacagtgaaacaaccatggaaccccctcatttcccgtaaactaaaccgtactttgcataaggagacaagaacacgatcacttggacatcttaccaatgcacagctcttcgtgtgaggatttgactttaaaaacaatactagtagtacatagaacacgcttatttgttcctcattaactaagactctaatcaagattagctgagaatgtactacctccggttccatattaattgatgttttggacaagattgatatcaaacttttataacttagactatcaataactttaaaaatatttattttaaagaaactagaacaacatatatagatttgtcttttaaagtatcataataaaagtaaacatgcatttatttattatatatattataatagaaaaataagatcaaaaatgtatcttatagactgtgtcattgtccaaaacgtcaattaaaataaaaccggagggagtagctgcttagaggatgaatttctttcttatgtcacaacagcgatggtgcaacagccaccaacggtctgaatgcctgaattaattagctgagttcgatttgaattaattgggttctgtggaatgaacaagtactacgaacagtactaggatataccacttgaggtttttttttcaagaaaaaaaatctctatttttttagtgaaaaaaaaaaccactcgaataggtctctcggttcttgataggcccaaaacactaaggcaacgttcgtttggaggacattgagggagaaagcaactcatttttcgcacgtacgcttcccaaagtactaaacggtgcgttttttgtaaaaaatttctataggaaagttgctttaaaaaatcatattaattcatttttaaaatttaaaataattaatactcaattaatcatgagctaatggctcatctcgttttgcgtatcttctcaatctcctcaatccccttcttctcaaacacaccctaaatatcgtggaattgaggttcattatttcattaattacaaatgatatctctgaacttaatgaatgctggagacatgtgagtaatactatcatttaaaccaatgaattgaagggctgatttgtgctacaaaggtggttgggaatcaagtgaaaataaatgcttccattttctagaaagtcaagaatcacatcagcaaatgcttcttccaaacacatgaattttacagaattttaacactcctatttagtttgaaccctccaaaagtccatcaaaaaaaaaaatcaaattctccaatttttaaaaacaaggttaagcttggtcaaatcacattccaaaccgctaaacccgcgcctatataaacctcctccccaaaagccccactcttggcttcgtctccttgcttctctcggaagcctctcgctttggtttgattttccctccaattccaccgcatcaaaaccatcgcgtcgtcggcgagatggcggcggcgtcgtcgtcgtcggcgtccgccgccgcggtggcgcggctgcgggagctgacgccggcgccgggggcggagctctcggagaccggcgcggccgcgctcgccgagtgctgcgcgcgcctcctcatctccgccgcggggggcgacgccggggccgcgcggccggcgctcgacgcgctgtgcgcggcgagcggggaggcgatgcggcgccactccgatgagctcgcgccgctggtcgtcgggcggctcggggacggcgacccggccgtgcgggacgcggccaggagattcctcgtgcggctcatggaggtattggccctcttggggcactcaattctgttcccctttccttagttggttagagctcgtggtgctgtctaatccagtgggtttgcatgagcagcttctgaattctgaactgtacttaattactgagattgatagttacagtattaacagtgcatatatacagtagtaaagtgagatcagaaagaaaaggaaggcgaatgttgcaggtttttaacaattcatatgaatgtgtcatatcttgttagagcacatacatataacaatagcaagttaacatattgatatttgggttgggttagttatctgcggaatttatgagatgcaacaacgttcacacatcttattgcccttaagatttggcgattttcaccctgttgaaaaaaaaaagctcatccaatgtatttctggtatctagtgctttcaacaatattgtgaaagcagaaattattacttatctatgttttttttggacataagaaggtagagcccttatagccatttcattgatataaatggacggttgcaaagttacatgaggagtagacgaggagagggagagaaaaaaggaaaatgaaaagggaaagggagaaagagaatgtacaaacgtttaaaacttaaaactgtacactattacttactattttgtaatgtgtgattaatatccatcgttatcatgtctcaaatatcagtttcataccttcatgctttgattactgagttgcagatgaaggagatgaatgcaaggatgggaaatggagaaaaaaccccatgcatatcagatgtccaagacaaccgatgtatgacaatacaaattgaaccaacggataccaatcaagcaaagaaaagtcccaaagtgaagattgttacaagagatgcctcacttcttgcaggtactatgagagaactcagggattcaaacctaaagaatgtgaattgctgtttcagtttcctttctttttagaccaatatcacactaaacttgttcttataaattacaatgtgaaatacttgtatccaattcagcatgtttttccacaattgtttgttctcagataagtttcaacatcaacaatgtaatccaatatacttgataggcaaaagcgtcccaaaactatttacttttttttgtaagaagtcaattaatttggtcttatatatatatatatatatatatatatatatatatatatatatatatatatatatatatgctaactgaccaaatgggtcatgagctcatgattgcatttttttcatcaaaataaaattagtggtgcaaataatcttaaattatctgtgaaaatgcatggcatcatctaacagcattttataacatatataaagttaaaagtgaaacaattgttagaatggtttgacccgcacaattttttatccctcaatttccaatcgagaacttgtttttatatgatcaactcaggcctgctggtcaagatgctcttcttgccactaactaatcttagcccaataggtgataataggctaagagcaagcagtgctggtttttagaaccatagatacctcaactgaacaatggagttctggttacctgttattctattatgcatcctggactctgatttttctgttctgttttcttcacattctttgatcttaccaaagctatccctgatcattgggaatttgggatgcgatctgtccatccatatttggtacaggagatggagatattacaagaaaatcgcttggaccaataaaggtattctctgagaaggacctatcaagagaaatagaaagagtagcatctactttacatccagataatgaatgggcaatacgaataactgcaatgcaaagagtggaaggcttagttctcggaggttgtaattcctgcacatttctgtttgtattgatcactatcattgtacacattgggtaagttgaagatttttgtgatttttgtctaatagtaatttgtgccaggtgctgccgactattcagccttccctatgctcctaaagcagcttgtgaccccactcataacccagattctggataggagatcaagtgttgtgaaacaggtctggatgtttagtttgttcgtctttgtaataatgcaacctatttcactgtttgagataagagaatgttgcttgtatgtactgcaaaccatatagttcccatagatgtactgtaggcaaaccaaaaatagatatattgacttggtgagcgactgcctttaaacctttggtattgaacagaccatctttcaatcatattttgggcgctcattaatccaagtgttttccaatatttacaggcatgccatttgctaaatttcttatcaaaagaactgctacgtgactttgaaccgtgcgctgaactgcttattccggtatgttgctaacctatttttacatctgttggaagttaacagtatcatcctggatacttctaaaatgacctcgttaccatcttatatttgtaggtccttcttaagaatgttgtgatcactattcatgtaattgctgagtcctcggataattgtataaaagaggtaatataccgaagaaattttgttttccatttgatttcatcatttttatgttcattacttccaaatacagatgctgcggaactgcaaagtagctcgtattctaccaaaaattattgaatttgcaaagaatgataaaagtgcagttctccgtgccaggtaagagaaacacaatattatagtatagctataatcttggatgaatgattaaaaaggcatttgctgttgtaggtgttgtgagtacgcaatattgatgttggagttatgggttgatactccagaaatacagagatcagttgatctgtatgaagaattcataaaatgttgtatagaagatgcaactagtgaggtatttatacggcacgattatttgaaatgtatgaaaggcacttacacatttcttccttatcttttccatcctccttttacctttgcagaaactttttagtggattttctttgcgttatatatcacatatatttagttaaatgtactgtacacctcaaatgcataactactagccatgaattaagtatcttttcgttattaccaaaaaaaataaaaatacataccacattgcgatgacaaaaggattgaaaggaaaaccaggaaaaataaaaggtataatgtaatttttagccactgtataagataaaatacctgcataaaaatagtgatttttccagtttcttaaaaaaaagggtaatctggaacattggtcctggaaattttttcaagaacacatctcaacctttgattatggttaaggccataatttaggcagatggttcactatatttcactaaacacttacatttttgtgcactgcattgcacttaaactagtggtcctgtgtggatgttcttttaatgttcatcttgatgacttaatcagagatttacactgattttccaattcgaaggtccgatcaagtgctagagcatgctacagaatgttttcaaggatttggcctgaacgttcgcatcagttgttttcatcgtttgaatcatccaggcagaaagtatatcctcagatttaactgatatatttacctaatttgttctataatttaacattattttgttgaattgcatagatgataaatgatgaagatgctgagacacagcaaaggcatctttctcctgtagaaagagttaaattgatgcagcctcaatctagttcttgtaattcaactgaaattgacaaagttgtcaaggtcgattctggaacatcgttttcttctgtagaccttcaatcagtacaagtgaaagcatccgttcagcatgatgatatgacctcaaaaattcagcctgaaggcaaaactgatggcactacaactactggaagttcatttaaagataccagtacgttagaaaaagaaacaagcccagacaaaggccctgatcctgataaatgtgattcaggtatatgtcatgcagaaataatttatttatattttatctgctagcaaatcaggatccattgaccaagtaattgaatccagccaatactgcaggtgtcaatttatcatcttgtgatccatcctctgccactcaatttatactagaacctacttcagaattgctaccgtctgatgcaactgttgtaacaattgttcaagacaaggctgaatgcaggccaaatactgaacagctgactcagcaagttcaagttttgggacatccttctgatctgctgaaccgttcacctcctgttagtttgaaagaatcaggaaactcgctgaaacataaccctattcaagtgaactttgatggtagctcaggtggaaaactaggagctcagaaagtgaagcatcatactagcgctcctaataagagtgttgttcgtaaggagccgcggaacaattacattcccaacttccggcgtcctctcttgagtaagcagatgacaaactggttttatgccagtaacagaagtgatttagatgacaagcaactcattttgggtgaaatggtcagcaacatggatgtgccctcctctctcaccgaggcactttctttgggtcttaaaccaaagtcagattggatgatgagggtatacgcattcaatttcttaagacaatctttgctagagcagggaccaagaggcattcaggaggttgcacaaaattttgacaaggttatgaggtttgttagtcgttacctggctgatcctcatcataaaatagcacaggctgctctctcatcactttcagagatcatgccagtttttaagaagccttttgaacattatctggacaagactctgcctcatgttttctctcagctgaatgatccaaaggaatccatcaagcagcagtgctcagcaattttgaaacttgcaggtgaaatctattccattgattcgctcttaccggccctacttcgtacactagaagaacagaaatctcccaagtcaaaattggcaattattgagtttgcaaactcttcttttgtaaaatgcacagtcagttctgacaactattctagcagcagcttccttaagccatggcttgaaaagctagctcttttgttcaaggacaaaaacagtaagctaaaagaggttagcgttgctggtttctcatcaatctattctcactacgatcctgcatctttgttaagctttctagttagcttgtcaatggaagaacaaaagagattaagacgggcaataaagcagttgatccctacaatagagagcgacttggaagagtttttgcaacaaaggaaacataagccaaaggtgccactatttgattcttttgttggtgcatatcaaccttatgctaaaggtttagtcataaagcaaaataagcaccatctgcatgccacatatcagtctgattgccttcaggctgatgatgtgttcgattctgcactccactgtctcccaagaatttctttggaagttcgtgagcgacgcgctgggaaaattgaatctgaatcttacgatgaatctaatggtcatgatgctgaaatgatggacaagaaatctagtgatacaaggtcgagtgacccccctagaacatttgattataatgtgatatcagataacacagttgagagtccaagaaaagagggtactgacatcaagagatttgaggaatcaaacgagagtgaactgaacataactgtcagaaataggaatgtcatattgaatagctgtcaagatcatggaccaagcatttccaggacatatcatcaggtttctaactacttgattgacccgcctaatgttttgtctgatcattgttttttttagattattcccatttcggtcagtctattttcttttgtggtttctattatacagtatgatcacatatattatttttgataaacaggatgaaatgagtcaaatggaagaagttccagagataaatggcccttccgtgtcaatcaaggttagataaggcttcgatctgaagctttaagtggcattgtcctgtaattagtcctgctgtcttttttctagggaatatgcaaaatgcttccgtactattgcattgagatagaaagccttttgcaaaatgatctaactatacatagggtataggcattagatccagcaacctgagaaaaaaaagtattctttttaactagttcccttttcagaatttacaacagatgtcctcttctctacttgagatgcttgatgatccagaggaatccaccagagagcttgcacttactctattggttgaaattcttgaaaagcaagtaagtgtttctgaagttatttaagagtgtgttcttggtgtggcatcatttaaatgccatcttccatgaaaatgacatttgtcatggccatgtaatccagcgaaaggcaatggagaactgtatcgatactcttatagttaaattgctgcatgcaaccaaagatgctgccttgaaggtactgcactgacagtgttcttttcagcttgcagttcttgatgccataaagttattgccctctcaagccttttatgacattgtcattgcaggttgtaaatcaagcccatatctgtttgacaacggtggttactcaatttgatccgctgacatgcctaagagtatgtattatttgtctttgggatattttattttcccttttgtagtagttggtatcttaagtgtttaatccaaataagcaggcaattgcttctcagttggccaaccaggatgaaaaagttcttattgtcagcatcaacagtttgagcaaggtactcctaaccccaagactgcagttgatatatgtcaatctttttttttaaaaaaaaggaaagatatatgtcaatcttgtgtatggtaaaatggcgagttcagttctaacaatattttggtactaggctagtaggctaaaccatcaaattatatggtgaaagagcacatgtttaatcctgcatttcgttatctgtggattatgactttcttgtttacctccacttttgtgatatcatattagttgagtgagctatgtacgcaatttttcttctctttgttgctaattctcgacttcttcctttatctgcagcttgttattcgattatcacaggacaatcttatggcacatttgtcgatatttcttcctgcactcctggacgccttcgaaaaccatagtccatatgtccgcaaggtcattcattcccactaactctcacaaatcctgttttaagatcagatactatttctcataagtgaatctgaaaactttgttcttattattcttcacctttctcaaaattctggcatcaaagaggttatggcacaatcagaaatactttttttttaaaaaaaaatggaaatagattccacttcataatgagcgtagcccttgttcaactacattgacaaaaaaattcataagaagtacagctacaagcctgcaatgttgaggtgttgagcttgagcatctcccagtagagtttattcagaatccacgagcatgccatatcgatccttatatatgtttgtattagccccttcagttttatgggccagattccactttagtcttaactgatctcagcacagttcacgagtacttttgtatttggattcagtgggctgtgggcatcatgcggcgttgttcctttggaccttggattgtttgcaaggccttggctttgtaatgtcatttgtgcccccctgaatctgctttactatatttgtgctactcaacacagagatggatatattctccaagaaaaagcaaacaaaagaaagtagcatgaaacatgcaaacaagcaaagaattcattcatgcaccctgtactttccaattaagttcatatttcatcgagatttttttgtccacagctctatttgctacaagtagcagaatgctcatcatcctgtgtgctgccattatattgcaggctgtggtgttgtgcttggtggatacgtacctgaagctcgggccagcgttcttgccgtatttggagaggctggacagcgcccagctgcagctggtaaccacgtacgccagcaggctgtcccagacgagctttattgctgtggacgcttgatgcaggcaacccagcagcaacagcagcagcagcagaagacgcaatgcttgtttcaacgataactctccaccgttggttagccttagccttctctttctttttatttatggccatgtgtgcacaataagggcagcagctcagctctctccccctttctccaaatttatgagcatagtagaatagatctctatactgtaaatcataattacctgtttttactacccagaaatgagatacatgcatgtaggcagtgcagattgtacaaccaatggaagaatagtagtactagcattttcatcctgtttgctacagcttatgtgatctaaaggaaaggaagaaaaaaatataatgggtgtgcagttcataggctgtgagatttccaacttgtccagttgctcctttggccgtactccacaggcatgtgcctgatttatactattattacatatatgacatatgtgatctatttgtaatcctgtgcacgctggcaaatctcgcagatactattactactaccacatttgggattgagaacccaattctcaaatggccatctagagttctgaatacacacagtggcagagacaagttgaatgaatttggaaagattaatactactactaacatgttcttcgtccattgcagagactgtgacagccagacaggatggcattatgtgagtagaaaaccagtaaaagagtagactagattagcagttactgataatcagattgtgcttaggcaggcggccggcagccatatgaatgatgtggtgtggaggacaatggcgacttgggggtcgcagaaaggcgtagtagagactagagagagaggtccaaggcagttaagcttgcaggaaggcagaggcagaggcagaggcagcacaggcactgtgagagcacatgcacgtctcaatgataggcgccaccaaacacccaagttgaggtcttaagcagcagtagcagccatagcttggcccaggcctgaccttaaacgcgacaggacgaggtaatcaagaaacgggattaagattagccgagaggctaatctaatgcagatggatttgctgctactactctaatggtggcgtggatgacgagaaaaaacatttgtccatgccaatttgccccctgctacaccaatcaaaatagagttaattataaatatactagtcgtaggttcgagttgtatgaaggtaaaaattttcgtggcacgtttttcaaactgttagacggtttgtttcgtgtgaaaactttctatatgaaagttgctctaaaatacttttttcattttaggttataagactttctagtattgcccacattcatatatatgttaatgaatctagacatcatattaatctatttttcaaatttataataattaaaactcaatcaatcatacgttaatagcaccttattttacgtaaaaatcttcatcttcatcttcacctttattacttcctccgttccagaatatagtaaactagaaccggattgaacgtatcctagtactacaaatctacgtttcatctagttatatgttgctatattttttttatacggagggagttgaaaaaagaacaccaccgtagtagcggtggataatctagtggcaatggaagagggggaggagtaataataatcttggggtggtaatggcagtggcaatggcaatggtggtgtactacgccgcttcactggacgcgggtgccgcggcccattaatgagccttcacgtgctctgccacgcccccacctcctcctcctcctcctcttcttcctccccatctctctcctctccctcttcctctctcctttccgtgtgcgccattgcaacccagagaggcagaccacgcacactgcacttggacacgaagacgagagcggtttccggtctcttccccccaaccaccattccctcctcttcccgtctccggctcgccggagcgcgagagctgctgctgcggcggcgtgggcccgatcaccggccggcctcctgctccgccgccgcggctgcaatggcgcgctagctagatccgacccatccggcgcggtttaatacctcggtgtatctctccggtcaccgccggcggcggcgacggcggaggcggcggttgcgggctcgccggcggcgaagcaagcggtgcaggtatgaacaaaaagagaggaaggctagtcactccctcttttttggttaatttagttttggtgagagcgtatttcgtttgccgttttcggggagggagggaggtgaccgtttccttcccttccgtcgctttcgtctccaaaagcggcgccttttcaggtgggattaatcaatgaatcccctctcgctttccctaatcttttcttttcattgccgctgtttgttaatttgtttgatatgataggagtagtaataggagtaggaagaggaagaagagctctctcctctcctctcctcgtctttaatggattctactggtactacttcttctactactaatcttgttcgtctcgtcttctcctaccacctaccaaatcaatcccatctgctgtctactactaaccggatccatccatggggaccatgccgatcgatcaactatttcctctcccgcctctcgcattggctacaaactgcaaagcaaagtagtagcaaacatgatctcctcctgcccacttcttcttcttcttcgtggcatttccatggattcataataatagcccccaatcacgggacatccatggattctttaactttggctttgttcctgattttcgccgctacccacctctggctttgatttggttgggccttttaccacacatccattctctatttctctctctgggtaagaaaagccggtgcctttctgaggagagaatgcgagctgagctgagctttcttgcggctgcctgctttccctttcgtgtggatttgatctccccggccggacgcatcgccacccatgtcgtcccgttccggtaagaaatttcccacctttcgcggcgcggttgcgacatgtgcaagcttagcttctcttacctgcatttgcgtgatgctgctgcagtattttaatttggagattacccagggcaaaaaaaaaaagaagaaaaaaaagaggcaaagctttacatatagctttgcttttgctaccgtattcttttctgtgcatcttctttggctgctactactactactgtactgtggcctttccaggccccggggtgaagtgtgatgattagttcttgtgccatctcgcatgatagttccctgcatttctctctccctgccatattgtttgttcttctcctcggggatgcggtgggggtgagtgcatttcacgtgttgattccttgcttcccactcgttgttgtttgggatgcagttgtttctttctttgttcgtttcgttcttggccggtttgtcttgtctggttcttctctcctctccctcttcccatcgttcaaaaaaagataaaatttggagctgcttgattgttcagtgtgaatttcgaactttgaaatcttggtgatacttgcgtattctcgtgatatatcatgtatgctattttggatatttgcttgcagtgttgagagatgagaggggttcaagataggaagcagaagaagaagcaggacctgcaggttctcgggcccttccctggatgcttgggtaggatgataaacatgtttgacctcagcaatggcgtggtcgcgaccaagatgctcacagagaaagcgcatagagatggtatgcgtcttcgtctacttctgtttcccccttcttgttatgcaagattggtgctagaccaagctctgatgcaatgcagcatacgccttgcagtttctccagcaggtaaagaccgtggtaatgctttcaagatggcaattggtccattctcatcacagatagaagataaaaaggttagtgaattgtctgtccccctttgtttcctgttgcttttgaactacaaacgaactcaagcataacctggtacttagtatgtatatgtttttatttggttttactacagagagatagtcagcctagaaagcagtccccaactaaaagattgagctcaccaactaaaagatctggtgaggctcctgttaaattgctcatggagcaggacatgtggaaagaagggatgtctggcgaggagccactgaatgttgttgccagattgatgggtctaaatgatgctgccggccaccaatctgatctgaaatcgggaaaaagatcagacaaggaatatcgatctggtggttttgatgagaacagtcggaatctcagaccaaagaaggacagcaaaggccacccaaaccaaaaggcaggaacacacagtgaaccatgcagtggtttcagtgatcaaactttaagaatgaatagcagcaggaataaacaccaagggaaggagccttcttgtgagaagagaatgacccttgtgcgtgaaaaatttgctgaagcaaaacgtctggctacagatgagaagcttctccacacaaaggagttccaagaagcattgcagtttttaagctcaaataaagatctgttcttgaaattccttgatgagccaaatccactgttatcacacaacaattatgagttccaacctgataccccaccttcggagacaaagcaaataaccatactgaagccatcagactcaatcaagagaaatggcaacactcttgtagggaggcagctctattcagacggagatgaaagtgaagggaacaggtgcaggcgtcatcagagtttaagtgtttccccaacaaattcaacattgtctgaaccaacaagaattgtagtactaaagccaggacttgtaaagtcccaggaacccaagattctgaggtccccttcatcatcatcaactgcagctgatagtgaagatgatagtatgtcggcagttgatgagacagtgccaagctcaagaagactggccaaagagatcacttggcagatgaggatgcgtttgaaagacaagcaggatgaagaaaacctactctcttatgagttccatgatatttatattggagatgactccttcagcaagtcagaagttgagaatgcaaaagaagtgtctggtgaaataagtgaggatttggagttcggtactcctacttctggccgttcctgggatttcctgagcaggagtggcagcccttactctgcatcatgctctagtcagacatcccatcggcgtgaaccatcagtggtcagagaagccaaaaaaaggatttttgagagattgtcaattgtatcatccaccgtcggtggtgaggaagaaagggaagcacgcagaagtatgggcacactaggtgagatgcttaccattccagaagtcaagaaagaccaagaagtgtttgggggagtcacattggagaacccatcacctgagatggattccgaagaaccgttcttgtgtttgccacggtctcgatctgttccgatttctttgtcttttggaggcactgagctaaatggagtagcgaccggttgtcaggaagccgagaaggaaaagaacaggaagtcattatcatttagggaaaaggtttccagtctgttctctaaaaataggaaagtggctcgggggaagctagatccatctggaattccatcaactgatgatagactcaagcatggaaattctgctactgttaatgatttcagcgaaaacgctgatcattctgcactggacaatccgcttaactgtactatacagaatgtcgatgatatttctatgccaaggctcatggctagttcttggcacatgaatgatatggaaaacatgcctgccaaggtattgagcatgttatgctctgctcaaacttactttaccgattttataaaaaaaaaaggcttgtatatgtttgtgccctttcttctatagtcatccaaagttcaaaatatgaaattttggctctattttgtcaggatatttcttccatcccggttattggtgccccaggaatctttggtgagtcacaggaccaaccaagtcctgtgtctgtactagatggaccatttctctccgataacagcaggagcttgctgtgctcatctgaaagtttcatcaccgcatccccacgtaagctgaaaacccttttcatccaactatgaaatataaacagttcttcgtaatatatatgtaaatgacatctgggtgtgtgtgtgcagaagctttgtcgagatctccacttatcggatcattttcacgctcactttcatgggaagatcccccactggaagtcatgtcgccaaattccttgagactatcaaggcttttctctaaggctgacgaagatcaagactcattgacatttatccagaagttagtctgctctgctggcatagatagagaaggttgcatgttatccggtcctttggaactgtatttgcttgagaagttctcagattaccaagaagagggaaccaaattacgggaaaggcggtcgaaagagaagtttctattcgatgctgtcaatgaggcactcacagagctcacttggactgcagaactgatggcgtatccattgggaaggtcatcttctttggaacgcaaagattgtgagaatgctttcagtaactcggcagctgatgaaatttggcgagtcataaggaactggtcgattcttgacaagtatccacccggagaaactattgaaagaaacctcctggtggaaatgatactgaagagagaggtgttggaggcggccagcagcgacacgacacgattggagacattcgagctcaccagtatggtctgtacaatggtcttggaggacctgattgcagatgcagttgtagatctgagtgcctgactaacaactagcgaggtacctccacttttctaaccactaattttgcttatgcctcctaacattgctgtttcacgcgatacttgctgctgtaacactgcttcattcattcacatcaccacagaaatgcatgtgatgccaaatgtgccttttgcctaatatatgtcctttattctttcttttcttttatttccttttctattttgagagggcctttcttcattctgatgtagaagtgtgctgtaaatagcttggcctgcttgaaaaatacattttgtcagtattgttgatatccttttaatccacgaacaacacgagacaaaataattgattccattcgtctctagtgagctgttggtgttgctttgcttgtggtcagtgttgtctcattcgagattgaaaagtagcctacaaaccaacagagtgtaatatattaattgcttcatttgttatcaccctgaccaatgtatgatctgatccatgagacaaaaaaatccccagcatgtcatgtgttcacgagtgtcacagggcaacgtaacctttgctatgttgcatgtcaactgtgatttatataatgtttaatacactttgtttacttcaatcatagtgcttatagcctaccggtctcaacagtaagacaaatgttgattggtcattgcccattggcatgttaatggtgaatcaatcagacagacagccaactttgttaatggtgaatcagacagacagccactgtcttctccgtgataatagcatattttgggttttgctaaaaaaaacatagaaaaattcactggagaatctcttggtgtcacatatcgaagttacaagtgggaactactactagttttcattgaacctgaaacaacggcatgaaacatggattcatggtgcattgtgcaactctagcttatataattttgaccccatgttggttgctgcaaactgaagaatccatgttggttgctggtgttcatactgcctgattgagtagtggattaggggattgtggtggctgagtggtgtccctgtccattggcatgtgggctactgtggcttcatgtgggtgtgtcactgggacccacatgtcagtgaccagatactactacctcacaaccacaccaactggcacaactggagagctgttgcacttgcaggtttctggggacctgaaggaggagaggagggccaaggatggtcagttcacccctgttcatctttttttcacaggccaaagcatgtgaaatttctggagcatcctgctgtgtaatttcagcatcctgatggctgctttgcaagttgccactgctgctcatgctcagctcgacacaggctctcttatttttagggagtgtcatggcaactgttgtttacattgtctctcttcagtacttcaataaatgaaaaggatgagaaatagttttttactactatgctactacatgggaaagtagtttcagtgggtaaaaagttctgatcttttcttctggctttctgcctctctggtccttgtggtgtttgttgcaacgctccacttttctgaactctcctcctactaaacaacagattttactccatgtgtggctgtgcaaagcagtaatagaaaaaaaaaaggtgtacccgttgtccgaattcgtaggtagtagaagttaattgtttcaaaggacggaaggtgttatacataaaagttaattctttttctgacggaggagggcgtactctctccatacaaaaacatagtactgatgagactttttctagtgttcctgtactcgaaaaagtttcatccaatacttagaggctgagttcagtgttgttaattaacgtgtgattaattaagtattagtaaaaaattaaaatagattaatataatttttaaagcaatttttctgtaatttttttataaaatatgtaccatttaacagtagtttaaaaagagtgcacctaaaaaatgtaccgttttgagaggtatagcacagtttttttttaaatgaaggtatgcaatcgcaaacctgtgggcgcctgcattatgagatccttgcttgcaaatctgccagtcgaaattaatgcctggggcaaaccttgtttatgatatgatgaacttgtgaagttgtgaacagtgctgggcgcagtgtcattaagctgtgaactgtttgtagtgtgaggaaatagcgtgtactcagtactcacttaccggcctagctaaagagaagaagaagccgttgggatagggttagttcacaattcatttattagggctcaacggtttctgctttttctgaagtgaaaaagagctgcctttttgtgatctgtggtggtctctgcttgtgcagcttggcctgttcatcatcgctgccattggtggccttgtgttcttcacgacctttaatataggagtaggagtactatgtgatctgctttttagttttcctttgggtaattcattggctacctttgcaggacactcgtggagtgatgattgtgtgtgcagttcaagttgcacatactctaggttctgaataaatttagtaattaatatactttggttcagattttcagacaagttttcaaaatgaaaccgctcagtatacaatcctgaattttcactgaattctgacgccgattttgtggaagtttagagatgcaaagtaaagttttttttccactgaagtctgacgccgatttggtgaaactttagggatgtaagtaaagttcttttcccactgaaatctgacgacgatttggtgaaagtttagggatgtaaagtaaagtttctttttttccaacgagaaagatgaaggtagcctttgcaggtcaatgcaacaaaggttcacactttcacagccaaactggttctcatctcgtttagaacttgttcagtttatagatattctaatccatagaaattgaaaaggtaaatacacttcaatcctacaggatttttctaaaggtccgattggatgtaaaattttcagcctctcctgtacgacagttaggaatgaaaaaattagtttgttttttatattttattcctccaaaccgaatggtaaaattcacccttcgtttttaaatgtaaactgaaaaagcccttagactttagacgtgtacagctttcacggccacgtgtcacacgacagcgtggggctcgcgcttagctttagctcgtacttgcatacgtgtaagtgattaagtagtataagtacaagtcatgtgcctatcagtaagtacagtacagtatattataccgcatgcatatgcatgcacatactcccagtaatcacgccgataatcttcagagagaaacaattgctgcgagataaactaacttgcagcagacagtaacatatagtactagtgctagtaaattcataatttacactttgcacatgcagtgagtgaaatcagagagcctgcagcaacattaatcaagctctgcatgtatgcccgaaagaagcggatctatcaacctatcagaaaggaagagtgcaatccagcagcagaagcagcaggcaatcgatcgatcagtatttattcattcattcattccagttccccttcaattcagttactaacagagaagcttgatccatgcatgcacaaccagtagtcctagcttgcattcaattgaatcatgcatggctgcatgccattcaattcagttcagccaaatactgaactaaccaaggagaagaggccaatgcctacagacaacaacaccaaactatgaatcatactagcagcagcttgatctatctagtataattgtgcaatctctcaccttatctgcttcaatccagaagttcagatctctgagtggtccatcgattgcatttgcatccctcagccagcaccctcatacatactgcatatgtttgatttagatatttagataagtgaatggattattgatgcggattatctacttattataggaattaattaaatattttgataaatatacttaacaaataatttaaaacaggtggtcaaacacaatgcagttgaataattttttttttagaaatcacattgtttttaagaaaacgtaaaacaaataagtggttctaataatccgatgaataagctggaaaaaaaaacagagccgacactactggcccatgtctggatacacacatgtacaaaaacacatagatacacgcacaaatacagtattagtacagcactatgcacatataccgctagacaaggcagcttttgtgccaaggcaaatttgctgtcctgtccatggcatccaactggtccaaacctgcatgcagatcaaacaggattagtattcaggaccagcttgggaaaaagcaagcaagtagcaagatgtacacaaacatgcagagatctagtacaaacataataacatatactgagagtgagagtacatacatgatgttgccagggcactgcagcaaattaagaactcatcaacaagccattgcacaatgatagccagagcttagctaactatagatgatgagacgaacaagtgcatgttatgcagtagtagtatagtatttgcatggatgcgcccacacacatgcgaccacatcaatcgctaccgatcagttaatgacagcgttagatgtgtccatggatgatgaggtcaagctgcaaactgaactggatttattgcttacatgtatatgtttctttcatgctttggcttggattttgatttgattcatatgtacttctcctgctactgcaacaagcttgcaatggtgaaagtgaaactctcctggatgcatcaggaaagggcaaaagcccaagataaatcgctctgcttttgagttggtgtcaccattaaggttggcaggattcaggaaagtaacatgagtggttgagatgaatcttaaccatgtactgtactatctcaagaactttgaggacgatgcatgattgataattaaaaaaaaaactaaagactccattaattcaacacacaacaaactcactcctgcaaaccaagtgaagaaacaaagttccttctcgcttcaacttatacaagtaccctagttgcggttgtttacaatgtagcagctgttgtaacgaagagtttgtatattatatatttcagttctgctcgaaagaagaaacagcagagcttctgctattcgctagagagagaataaaaacggctttttatcaggttggaactgtcctacaaggtgcattgttagcttgtcattagtcgcgttttagcacacagaatggataccatagcactagcagcaggatagatgcatatgtatggtccatgcatgttgattggtgtctgtgagtgagtaactctgctgctttttctcaattgactgctttgctgcacaaaggaccacacacagaactcttgcaagttgcaactaccattcacgagtcaaacttgcttaagactcttgtagaaatgtagttaattacaactaccagtagcaatgcatttcttttttttctttgcacacacaatgcaagttgcattgatacagtcatacagctcaggattcagagtttcctctagcaacatatggagtagtactagcctaatatatcgagtactagctttttttttctctaattgttcatcgatttttgctcgcaaatactgtaccagttcgaagttttcgcatgcaccaaccaatcaatcgaaacaacaggtcgaagaaaaaaagaatcggggagggcggcgatcgagtaccggaggctgaccccggaaggggcggggaggggagggcggcagcggcgccggtaggagacgccggcgaggaggaagccatcggcgacggcgtgacggcgggcggcggcgggagggagggtagaggtagagcgagccgatgaggcaatccaattatttgggccgtcattagtccaagctttcaccaacagttgggcctcagacgaagacaaattggccagttgttagtaaagtatagctagaataagtctactatgactccctcctttattgctcctgattgagggtgtgttcgctactagagcttcccgcgccaaaaacggagcggtctattagcacgtgattattaagtattagctaatttttttaaaaaaatggaacaatatgatttttttaagcaactttcatataaaaactttttgtaaaaaaacacaccgtttagtagtttgaaaaacgtgtgcgcggaaaacgagagggaaaagttggaaccggcagtgccgaacacaccctgaattgtcttcccaactgcaaaacctgtctcagtgagtcgaccagagtcaacctgtcacgtcagcagaaaccgcttcataaggagatcgtctttcgaagatgtaggagctgctataaactgttttttagttgagggaggcaaaatagacttattgcaataaagcttgaggaagcccattgaggcccaactgaagcccataggaactcgcccggtgtgctgcagcctgcagccgccgccgtcaggtctcgcctccgccgcactctcctctctgtctccgccgatctgctctgccgcgacgcgccgccggcgagaagggacggcctcctctccttcccgaccccgcgcgagcatccagtttcgaggtattcctcctcgttcttctctggttggatcgatgcgcctgcgtggcgtagttgggggattcatccggactaactgatttctttcccctccaattggcgcatccagtttcttctggatttctaggatggcgactctgaggaacctgaagatcaagacgtcgacctgcaagaggatcgtcaaggagctccgctcctacgagaaggaggtggagaaggaggcggccaagactgctgacatgaaggagaaaggcgccgacccctacgatctcaagcaacaggtgaagaagatctttgtgcttgcaattgcaagcctttttcccccctttactaacctgcctgttaatttgtctgcattattctggtagtaaattgcaagtgcagtactgttagggagtagtacatatgccgtgtattgtgattaaaagaagaatcttatactagtatttatcaagggctttttgtttctcttgtgaatggttgctcctcttgttgcttcgttattagttgtgcttcaattaatcagcagttcatcaaaatgattaggcaaaagaagtatctaagccttgttaacagtctggtttatccttttgtgtttgtcagttttgcatacatgttgccaagaagtgttcttagtgcaattatatcgcattgatgtaattgactgagatcaatgaaaacttccattatctaaaaaatatacatgtttttatcatccattccacaatggttgtggcatagtgatttctgcattatttatggttggaatctatggtgtcaagttatgcttcggttgcatattcccgtgccactaattctaataattaacttaatggtttggcttcaagcttttccgtatatatcaataatgcaatataccatgactcactgaacaagtcagttgttggttgtaattttggcttctggttttgtccaatgacttagatttataacaatcttattctagtccatttacccagtagagaataatttcttccttaaaaatgcatttttgagatgttttgattgggcagtctatgtaatcatagcaacacagcatatggatggacattgttataaacagggttgtgcattaaatgaacatgtggcggatgcattcttcagagtgctaccatgttctctgacaatcacattatacagagttttacatataggtgttgcaaggcttgtttaagacatcacagttcatatatgtctgaagagctctaaatttgatttgatttttttttttttttttgtgtgtgtgtgtgtgtgtgtgtgtgtgtgtgtgtgtgtgtgaaaatgagattgggaagactgttgctcagttcgttgcaactacatttctttttgaaggagcaaagctgattattggtggcgctacatctcttccaagttgcaattcaatgtggaaccctttgaactttatgttaatgtcatttacgcctgcaggagaatgttttagccgagtcaaggatgatggtcccagactgccataagcgacttgaaactgcactggcagacttgaaagcaactctggtatcgtatgaatttttttctggcgacatttaaattctgcatatcctcttcttcagtaaccacaaccattgttctattgcaggctgaattgaaggaatcaaatgaacaaggtgctgagattggagaggctgagagtacaatcacagaagttgaagctgtcgtcaagccaacagaagattgaattcgttttttatgaaatccctgcaaacctctgttctgttggggccatagtagctcaactagtattatgatgtttgctgtgaattcatgtatccattttgtggttcctgagccctaacttggaagatctggcactgaaccatccttactttatgtgcttgcttgttcttcctgaagtacacagttaagcatggttgtgtccacttgcctgcttcttcttcctccttttctttgagattattgttagaaagtattggttcgagccttcgaagggcttgggagaatgcgcttaatcgtttttaagtaatcaagagttttcatcagcaaagtcatagaattgctatataaacattggttaatttgcatatacaagtgatactccgttctgacgaaaacgctaacaaaaaaagggttaaattagcaacttgatccatgtacgcacaatgaaactgcaggctctgtagtctccattaacactggaaaattgctagttaaaaattggttaaatctgcgtatatgtgtataatttctatacaacgtttagctgtacaatcttctatgagttctatcatcatttgtgatgtattgtttgcaaaaaagggagaaataactgtttgcaatctcccgtcggaagtaagaaaaatcacttcacaaaaatgcctcccggatcaaccgtgcaaatactcgcgatgacaaccggctcatgacctctggtaggatcttcgacgaaatgctcggcaacacaggtagaagctcttgtacaagatacacaacatttacatcctggcatcaacccaaagacaaaaaatcagtaatctttagatgttcgatttgtggagtgtttcattcagtaagacaaaaaaatcagtaatctttagatgttcgatttgcggagtgtttcattcagtatacataccccatcaattgttgttggattgttcccagctgtcaaaaacttcacaaccttctcaacattgttcaagatgaccctgtcttcctctgtgattgtaggaagcagtgctctagctctgacaggaaccatgctgaaaactggggtagcatttcctagcccaaaagatgcagcaatttgtatcagttgctcccttgaaactgcatctatggctttgacaatctgcaatgcagagaacaagaggtctcaatatggaaggcactggattatcttaaacaacattccctgcaacatgcaaattactgttgtttggtttaaacaaaatacaaaaatgctgcaacatgagagctcacctcatcaagaatgaactccctaaaaaagtcgcccctctcagagagtagaaaagaaagagcagcccgagctttgactggttgctcaggctgtgatatggccattggaaatgcaggaactaaacttgtgcttggtagagttcctatctcagccagctcagccatgctgcctttcaagttctccccaccaccactctttgctgcacgaataaaattctcgaaagcttgcatgacatcaatgaatctttctgcgtcgaatacacctgttttgccatatattgtgtatcgcaaggcgctccttagacgaggtgactcatctgttagtagtctctgcgatcgtcgaaaaaaatcagaatcaataatacaataacatcaaaatcaaccttcgatcccaacagaccaaagaaagaaggaatatgcaaatcctagtatatatctgcttgcctttgtagttgtgttattctaagaaatgcagcatggagttgaatcaaattctaacctgcgcaatatatgggtatgcttcatccacaatggcaaattcagggtcacccaccaaagctataccctccaatactccaatggctctgataatcaaagcaaagtacggaggtatcctgaatgggtaatcaaatgttatctgtgctagatctgctgctaactcttgaaagtttatattctttgcgccacctccttcaagtgcttgatcaaaaactttggccaatacaggcaagattgggtccaagttaactccctcagggatgaaaccaagcttcacaaagtccttgactatcgcatcataatcacgatgaatgaggtgggctattgcttcaatcattccgtacttttggtcatctgtcaatttagttacaagccctacaaaaaggaggatatatttctttcatcagcatcaaaggagatggaaacaaaacgaagaaaaaataggtggacccaaaggacagtacaaaacaagtgtattcttagtcctttttccctccttcaaattgaagaagagtatttccacgtaatgctgacattaccactgaatagatatttaactaaataataatggaccatggtttactgactccgctcagcctttccttttttatggactcgcatgcaaactaactagtataacttttgtcttttatatgagaaccaaagaaaaataacagagctgtgtgtgagaagtattatccataatgttgactcaccaaaatcaagaatagctagttttccatctggtgtcctaatcatattgccaggatgtggatcagcatggaaaaatccagtatcaagcaactgccagagaaacataaaacgagcccaagaaaattgaagtgatgtcttgcgcaaataaaggtacttccattcaacaagcatatgctacattgaccaatgattaaacaaaatgagctaacctgttttaggtagcatatgactcctacactgaccaatgacccaacatcatcctctgtactttgtgacagcttctccccatctatccattgtgtagtaagaacttttctagatgtgtatttctggtatgtctttggtacaacgacctggaagattgttagataaaatcataagtagcttgacagtaaaacaagcatgtatgtgttgtaataacatggaattaagacaaaacagataactccaacagtaaacagatttatcactcgatatggacactagaataattacctgcggaagatcctttttcatcatttcagcaaagcgattgccattttctccttcattcacataatcaagttcttcgaaaaatcgagcagcccactcatctactaggccaacaacatcaatggagacctaacagtattcagttatggttcaaaggtgagctttcaaatatagtctgggcatcagttttgaccaagtagaagaaaatatttacctgcggaaatctccttagtaccaggcccaagtttctaatgatgaataaatcaattgtgacagtttcaagtacaaacggcctctgtactttcacagctacaagttctccggtttctttcaagcggcccttgtaaacctgccccagagatgctgcaagataattcataagcatagtccaagaacagtgagtataatttgatgcaatataatttcatctgataatggtttaatcataaatggtaagtgcagcacgcgggcaatatttagtacaagtaccggcagcaattggggaaggagataattcagagtatatttcgtgccacggccgcccaagctcttcttcaagaagagtcattgcaagatcatcggagaacgaaggaaccttcacatagcggtagatcaaccagttagcaaatttatagctctcctggcacttctatgctttgtgagatagcaaggggagaacacagtaagacaaacacagaaatatttaccttatcacaaagtttctgcaattcagtcattgctgcaggggacagaatatctggtcgaatacttagtgcttggccaagcttaatataagcaggacccaaagatgtcacaatttccctcagctcaatcgcacgcgctacttcattctattgataagcattgatccacccccaaaaggaaatgttctttatcagttagcaattggatttagacgattcaagatgaaaacaacaaggtggatatagtaaatcaataattggtacctccttgagcttgttgtttatgaggtctgatatgagatgagagatgaaaccaccagcaacagacagcaattgcacgatccgtgtggcgacggccctcgggcgcttcccccagtatgcagaaatgatctcaggactgtacacgagaggcagcgcctcattgttgttcatggatgaaacctagagccaagaaaagggggaaatgaaaattttgttcttctattagaccttagttgaaataaactgttaattaacgtgatgattgaattgtgtggttggtggggcggacctcgacgaggcggaggcggacgttgtcgtcggcgaattgggagtcgcggaggttctggccgcggaggccgcgcatgagcgtggcgagctgctcgtcctcctccatctgcttccgcactcgctggatctccttggacacctccccgaaccgcttcaatcgcaaacacacaaaccacaccaacacaatctccacaatctcagcgagatgaaacaggtgtaagaacacggaagatctgactgattgagcagagaggcgatcggtcttacggtggaggagatgtcattaggggtcctcgtcctcgacctggagcgaggcgccggggcggaggcggagggcttgggctccgtggcgacggcgaggacgcggcgggatgggcgccggcgccgacggcccggcagcgacgccgcgagaccaggcagacggccgaagccaccgcagtgcagcaggtgcggcgccgccgacgccgccgccgccgcggcctccatgggcaagaagaagaaggaagaagcttagcttcttcggcgaagaccccgaggcggaggaggaggatgaatttgccgcgcaataatcttcccttgcagtgcagtgctctagttgtagcagtaaacgcgggaggcgccggagccggagttggactggagtgtggagtgagatggctggctggcgcgcggccacgtggcgtcaccgcgggcacacgaggttcgtgtgcgcgggaggcgcggacgcatgggcggcgcgagagcggccacccccaccaaaaccggtgaggagaggacgaagcgcgatgtgtccgctttggattcgaccacccagattcccaccacctcaggtaaaatgccaatgcacccaataatgctagcacagctctagtgattagtgattcctatctccggcccattccataaaaaatgaatttagcatagaatattatcggagagtgaactcctccaccaagaaaccgtgaggcccccatttgtgagttcggtcaggggcagcgggtgagatttgagggcttggtgagcggaactttgtgatcttgagggtgttaggcccctccaagacgatgagacaaaagaggtttatacaggttcgggccgctgagaagcgtaataccctactcctatgcatgattgattgaatgtagaacacaagtgcttggagttgcgagacccaagcgccagttcgctcggaagtcccccccccccccaactaggcctggacctccttttatacctcaaggggttaccacatgggcccaacaacctaacctaactccggtggagaagtattataatctttgcattaaatgcatgtcttgtctcttgacttgggaagccaagcacacgtcgtcttgatgatggggcctgtcaaatcttgccgcctgacacgcaagcagcgcacaggcgcactacccagtcccatcggtcattcgaccggtcacagactggttgagtatactgcacgccgcatttggcgcgaccgctcgggtcgccataaatgcgggtaggtgggcacctgtaggcggacacctaacccaccgtatgcggtgacctagagagggggtcggggggagcccaacccctagtcacgggagggggtcgccgctgcccgaccttgggcccgatccccccttgggggagggccacgtggcgcttggggcagccttctccttctagtctcggccagggagtggccgccgccctacctcgggcccgacccccctcgggggagggccacgtggcattggagggcagcctcctccatctagtctctgggaaggagtggccaccgtcctacctcgggcctgactcccctcgggggagggccacgtggcatcggggggcagcctcctccgactagtctttggggaaggagtggccgccaccccacctcgggcctgactcccctcaggggagggccacgtggcatcggggggcagcctcctccgactagtctttggggaaggagtggccgccaccccacctcgggcctgactcccctcgggggagggccacgtggcatcggggggcagcctcctccgactagtctttagggaaggagtggccgccaccccacctcgggcctaactcccctcgggggagggccacgtggcatcgggggaggaggcctccctctaaacctgatacccccgggcccatatcatcgacaaatgtgatacattacagtattatgaatctagacagatatatatccgaattcataaactatgatatgtcatatcctgtagaaggttgattttctatgggacggagagagtagtgcgcaatgcaatcatcttttcacgcttatactgatggtaagatgtggagtaacggcttattactagcaacttaaaaatttgataatttacaaatataatttttatatgtgttcttaataataatgtaaattataataaaaaaaaccattaaaattaactctaaatttaagttttcatatttaaattttagcttttagcttataagcttgaggtaaacaatgggagtgcaattctttaccgcaaatggttcaacggacagatatcacaagtcacaatagtaagcacgaaaacaagaaagagtggtcgaaaaagatgagctttaatttttttttctacccagttggtcttttactagagaaacagaagaataaaaaatggatctagacaacaacaacaacacgatgtacaagaaattttacagacaccaggagaccaccccacgtacagcagcagctccaggacacccccaaaggtgatgtgcagcaatagctacctcccaattcatcgcgttttcgcagctgatgaggtcccgttcttttcaatcgcccgctgcctcgcacgctccatcttccgtttgcgccattcctcaagagctgcagatgtttacacaaaatggtaaaagaaaaaaattagcatcagcttctacatattaccgagggaggtagaagagcaaaacgctgctccagcaagcatgcaaaataaaccgttgtgtacagaccaaatcacactgctattgcataatggtatattaccaattgctagcatatgtatatatatgtacacctgatgacttcaggatatgatttgctatgatcattttgtgtctctgcatcaactggcaggatagaatggaatggtggtgaaatcacaatagcttggtattgcaagcagttgtttcattctttcagcttttcttttcagccctgtcctgaagctctctgatctatagcccatccaactgtattattgaactgttcggtttaactgtgcaactggtcttttttttctttccatgaaatatatactgtcaaatactcgcagcacaagccacaactaaagggccacatattgacagcaatatgatggtagtactacaaagatgtaactgtcacaagactcacaaccatgtttgcaagcatctaacttcattttgttcacatcatatgctcctcggatccgaacagacatagtacagaagataaactgaaagaacaatgcagccccaaaatatgaggagtggtaagaaaccaagaatgaatttacgaacctttttggctgctaccatcattccctgcccttaaatcttgcaacctttttgatgcatcaacagcagctgtctgcttggcatcttcttgtgtcatcatgccatgctcaccataagcttcttgttcgatttccttcacctatgtagcagaaatagcgaagttctaactttgattagcatcccaatgaattctctttcaaccaaatcacgagaaacacaatatacaatatacagtgacttactctcctgatcaaatccacaggctccatagcacgacgtaactcttccgactcccatataaaccgtagctgagctgcggaattgtagcacgggatctttcactgaattgagtatataacaggactgatctcacatgatataaaggaaaaactagaatttgtactaaacgaagaatggttgatcccattctataggttttgagcgcagcttatagtgctgttctctacatttggggtttccccatatgctcagagctcatgaggtatttcgattggaaaaaaaaagagtgatttttgtcagctgctcggattcgtaaagaaattccctgcatttcctgtggcgtggtgttagcagaagcccttgtccacatttaatcagaagaaaagacctgaactttgctagtcagtctagatccaattcactaaccagtttatcgtactatcatttgggtaccaaatcgaacaaatttctaggcccaaatcatctaacgagagatagattgttcaatgagagtgaaatgaacaagagtacaatgagttcgtaccagaatcgaactggtggtcgccggcgatgcgcggccaggacgagtagtagttgcggaagaggagagcgcacgcgaggaggttgattgcgcacaccgcgacggtggcgttcttgtacgatatcctggaggaagcagaagccccacccctccacgccccctgcccgtccatcccgtcgactgcggccgatgcggcggcgcggcccgtcgagctcgccggagaagaagacgaggaagagaaaagcggacgcgtccaccaaccaacacaactcacttcctcacgtagaatggtaaatgggcctacggcccattaattagcccataaagaataggcccattaatgagcccataaagaattgggcccaactacctcgcgactaattgggcctccactaacacctagattccaaccctacctcgcttctctcaccagtcaccaccacttggccttcctcgtctccggccttcctccaccgcgagctccgaccaccaccgacggcgacgatgcaggcggcggcggcgtggaggcgtcacctcctcgacggcaacatctcccccaccaccgcggcggcgatctccgccttcagatccgcctcccagccggcgctcgcaccccaaggtatggaggaggcgcccttccgggcgtccgggaccagccctgaacatcgcccgcgggtgccccccgagggtagatcttagaggtggtttgggttttcgatgcaggattgggtggagcggatggcgcgaggtacatgtccgcgagggcgccggcggtcaaggggacggggcatctcgtccgcaagggaaccggagggaggtcgtctgtgaggtgaggagctcaggctggttccgttcctccgattgattctatcgggcattcccgttgtcacgagtctgcgtctaggtttggccttcccaatgatttggtttaggttcattaggttgtgataatgttctgatccatccgtactgtcatagcagatatgtgttccttagaatggtcttcctgatgcttagatcgtcagatttgtgcagttcgtatggttgcatttgcgatggacctgttcttgtatacttgtgcatctcgtggaatttggagttacctgtaacacagctaggccttggaaattctgtgccctgaaaaaacagagagtcgattttagttattatgagctgaattggagctctggttgacagatatgtgatgttgttctaccaaatgtatttgatcctacttcccacatttttttgctaggtttgagaaaattcatttgccatttgcatagggtgttgagtgtacgaattgtggtactaatatttatcttaaagagtgttacttgcacatttgctggtgtttgttgcatcttgggagcaatgacgatcaaattaggttaatgatactcttaacctgcaaattttcctttgaatttataacaagaaatttcgtgacagtggaatcatagctacggtgtttggagctactggatttcttggccgctaccttgtccaacaacttggtgagatgataaggctttagacctatagtactacgttgtaatgaataatatcttactgagttatattaccataaaaacaaagtgaaatagtatggtaactcaattatttatttctattcagcaaagatggggtctcaagtgcttgtaccattcagaggttctgaggattgtcaccgacacctgaagttgatgggtgacctgggtcaggtactgtatttttgtagttcacaaattacaagtagtgaagtcattaactcatttttcctttttttttcccttttatgtattctacttttttctcttggcagattgttcctatgaaatacaatccaagagatgtggattcaattaaggctgtcatggccaaatccaatgtggtcattaacctaataggtatgtctaacttggtacagcatcgtattcagagtcaaatcccttcctgactatgtcaactcaatttcaacaggacgcgagtatgaaacaagaaactatggatttgacgaagtaaatcatcatatggctgaacaacttgcaatggtatgcattgtgcgcacatccgcttttcttccaactatatagataattcctaatacaatctttgagaattaggattgaatgaaattcaaagtagcaaccagcttgatttctcagtgcactggcttgcttgtgctcatcccaagattgcagcagcattgacaagcaaccatttggctggtttatttcaccagctataacttcagagggtcacataatccatggttgtgattagatttcaaacttttgcctgcttaggtgaccttggctaggtttcatctgacacaatacaaagcacaatatatttaagcacactgctctgccatcggtatataatccgtctagctgtccttttggttaacattaatccttctttttcttgtttcagaagccagtgttacttagctcctagatctggaaatggaaatatcttacttttacattttgcatgaaaagtatctttttctactgagctgttagtcttttaattcagcatcacagttactgccttcaatgtggaattactattctctttcctctaatttgtgctgtcctgggtaataaccatgctctataatttcattcaattggatacctgtacaaaggggaaaaaaattcactatcatttgtaactttctttttgctgcatcatgacaatataattcccatcaagacttcttttgtggctggctattaactgtgttatggactatgcacagatttcaaaggagcatgggggtatcatgagatttatccaggtttcttccctaggagcatcggcctcttctccttctagaatgctgagggccaaggctgctggggaggaatctgtgttgaaagaatttcctgaggtgatcatctacattaggcaatactgaactcctgtttctacattaccgaaagttagaagcaaacatgtcccatttatgttggcagttactttaaccaaaattttgtttgcatggatcaacaggctacaattatgaggcctgcaactatgattggcacagaagatcggattttgaatagatgggcacagtttgccaaaaattggggtttcctccctcttgttgattctgggtctacaaagtaattgaactttcctgttggctgctgttgtaatgccttgacttaaaatttagtctagaacattaattgatcagagaatacgggcctcatcatttgccctatggcttataagccattgccaaaatttgaattttaaaacttgattttgaagttgattttgatgctaattcaacgtagtttctttttcatcattagcttttaagtcgctaaagacacatgtaaaagtattactcataaattactttttatcagtaataagccgttacggcttataatcagtcgtaggcaaccgatggggacctacataaacttccacagcaggtgagataacatgaatgcaaccttttggtttttgcaggattcagcctgtttatgttgtggatgttgctgctgctattgtcaactccctcaaggatgacggcaccagcatgggaaagacctacgaacttggtggaccagagatttatactgttcatgagctggtaattatcatgcacaacattttgttatgcagcaatgaacgaatcttcaagttggttggtcgagtttttttatataaaaatgttctggatgttacaggctgagctgatgtatgagacaatacgtgaatggccacggtacatcgatgttcctcttcctattgcaagggtatgaacttaaataatatcttgtgttggtcaaggcaacctgagtattggattgtctcgtcttttaacagttatgcttcgggttgtgcaggctatcgcatctccaagggaaatgctgctaaacaaagtgccctttccgttgccaaccccatcaattttcaacaaagatcagattaatgcattttctgtagacaccctagtgtctgataatggtaagcatgatatcttatgattgatctgtaacctattgtttgcacaagctcacatttgtttctggggacataatacagctctcaccttttcggacctcggaatcgtgcctcacaaattgaagggttacccggttgagtttcttgtgtgctaccggaagggcggtccagcttttggttctactgtcagtgagaagatacgaagttctgagctgtagtcttccactcctgaagacactgtagaattaatcttttagttgcagaaacgttgttgtgtttgttttcttactatctgctgctgctgctgccagccgcccaacagcgagcaggaccatattcgatgcatatgttggttcctgctcatgtttttcaccaataagacgcacaaaatctttgtcaattttttgagttgcaaatgcaagtgaggcgaatcgttgcagtcctacgacacaataacaaagatatgtttctttctttaccctatacatatatgctcgctggtttgcattgcttgcaatgatgctacggtgtgataatgtgataataatttgtttagtgtctaatttagtattaggttactatgttgtaggagtagttgattagcacatgtacaaattcactgtataccattttgcttgtgatgccctgtccataggccacacagcccatcaaagctgcaaacacctctctctgcttcctggctgttaggcctccacaattctgctactcctggcccaaaacgcttgtacactgatcagatcgattgattgattggtcttctaatttcccagaagaaaacaaaagggagagattgattactgtgttcactggcactgtcatgagaaatggatgtgccagccaccagctgagctgacagccgaggacgagcgagccaagcaaagcaaatgcatggaccagcaactcgattacaacggcattaccggtaatcaagcaatcaaccacgcgtgcatgcagctaccgctttgccacatcactcaattcacaactactacctctaccagactaccagtcgtactgaattcgaacttgtggggtttaattccagagtggtgattttgatcaatctgaattcgatcaatgacggggacgcgtgacgacgtcgcccttttggcccgccgattaagccgctggctgagcttgcattgcatgcatgatgcatatatatggacacccagatgtgcagccctggacggacggaccgacgcatatattgctgcttggaatttctgacgacttgatgcatcaaccaacgagctcaagtaccaccgagatgcaagaggccgtcgtgctgcatgccatgcatgcacgcacgtttcatctgtcataatcactccggctaattataagagagaaattaatttgtatgctcccaccatttcatattataaatcatttggctttttggtacaactgataaattttcatatgaaaattgtttatttgatcacctcatggcagccatttatatatactccctccgtttcgaaatgtttgacaccgttgactttttagcacatgtttgaccgttcgtcttattcaaaaacttttatgaaatatgtaaaattatatgcctatataaaaatatatttaacaatgaatcaaatgataggaaaagaattaataattacttaaattttttgaataagacgaacggtcaaacatgtgctaaaaagtcaacggcgtcaaatattttgaaacggagggagtaggtaccaacgagagtcagtacaactgaaacaggtatataaatgaccgtatcgtattcatacgccgcgctcctacagcaacagcactaacaactcatgttctctctcaaaaaaaaaaaatcatatagtatcaacttggttggtactcggagagattaacgtttcaactcgagcacaaacaagggggaaaatgggcaaatgagagagatgtgattggaattagttgactagcttgctctagggtgtgtttagttcacaccaaaattagaagtttggttgaaattgaaacgatgtgatggaaagttggaagtttatgtgtaggaaaattttgatgtgatgaaaaagttgaaagttcgaaaaaaaagtttagaactaaacaaggccctaattaaatggagtgaatgaatggaaaatgagtggctggtttgcataaaagcagatgcactaacagacagctgctagttttgatgacacatagggtgtgctatccagctatcctatgaatgctagacaagaatggcatcctggacactgttaaactagtatcaatgaaatctcagaaatcatcttcataagtcataaagtagaaagatttgcaattttcagaggatgtactccgctgagaactattacttgcaaaatctgagaaagtttatgatcaaaatatgtatgtctataatttgtagggattttttttacggtgcccctttcaaaacatgacacactaaattaagaaaagtgattacaaacatgttattaatttacttgcgcctacacacatgttactcgtaagtcgtaacaggagtaataaaaaaaactggtatatagtctccactcctagtagagttcaatctagacctatcttctttcaatggatcatatttatttttactatcatcttaactactatctctatccgacatttttctcagtcctttgaaactagataccatccaaattcttatattttgataccgaggtagtactaattaataacctcaactgtttagaactcctaaatattaacgatcgagattatttccacttctaatgatgagggagtactgtagtgtgctgataccagccggcttaagacaaactgcagatcaaggcaggaagagagatactgtagagctacatctatcattgttattgtgtgccttgggagttagacaaaaggcagccgcatgctttgatgccctaatttttggtctgatgtgttcgtgtggcgattgttttcttttccctttttttttcttttttgcctcccaggtagatctttcaggttaagaaaagatgatcagacaagccattgattggaggttttgactctttccttctcccaacgcgtttacttctcttgcttgctcgcttccatatttgttttctctgcattctgattctgatgctgttgtacctcttgccaactttttaattgacacaagtgcgccttctttacgagtaggactaacaccgtccattttaaattactggtatttctttatatctttgcaataagtcaaacatattttagccatcaatttctacaagaaattcatatattttaacattataaattttatgtttttaagattcatcgaaagaaatactttcatagcatatatataatctaagtattgaataaagtgcagttctctcctttgtggagcaagataagcagaaagaaagcagatagttaaagtatatagtgcacttacttttgagctctaacttttgaccactgcaatttacttgcgtttgtagcttcctaatgcaaaggatcagtgatggctttctgcgatcctaccctatatatgcaatcagtttgggttcacccattggaaatgtacaaaacgattggatacattatacagtagtattgctgtccatttacagatttcactgttcagtatatttaatttggagctgtaccagtcgctggagattactgtacgtacaagggattaattttctgtactggctacgaaagaaggattgaagctaccttgtttttactgaaggtgactcttgtgtcctactaccagatcgtacaagacggtaagacggttaatgtcaatcaaaccgaactccgaaccatgtgtgcttggttaatgtcaataaggtgattgcaggccgtagtactgcttaaatatccttggcctgataattaatttctctaatagtaaatatatgatgttgttgatttttcagcattcatcttatttcaaaatctacgtcaatagtatttatttatgttattcttttttatcagtaaatgtattttaagcatactttattatttatttttacgtttgcactgtttttttaataaaaccaataatcaaacactatgtttaataataaacaacatcctgtacttaaaaaacaattggtaatactccctccatttcatgctataatactatttaactttttttaattcaaactttcttatatttaaccatacttatagaaaaatgtagcaacatctataatactaaatagtttaactaaatatagcattgaatgtatgttgatgctatattttgttctatgttaaaaacattgctataattttttgtaactttaattattaaggtggtgtttggatctagggactaaattttagtccgacactaattagaggcattaaatatagactaataataaaactaattgtataaatgagaggtaattcgcaagacaaaatttttaagcctaattaatccataactagcacatatttactgtagcatcacatagactaatcgtggattgattaggcttaatagattcatctcgcgaataagttcaggttatgaaataggtttatcattagtatacgattaatatttttaattaatatctaaatatcggatgtgacagtttagtcccttatctaaatagtacctaaataaatgatttagaaaaaaaaaggttaaagcatcggagggagtagcagttttggtatataaagctgggccccgcattaacgcgcttgattatttccatgcccaactttttcttagataatgatctccatgtccagcctaggaggtaatcaattgatccggccatgaaattctgctcactttgatgcttgaaataataataaaaaaatagcagatgcatagagttcgattgatccccaccaagagcaggtaaagtaatatactataaatcggttataagcttatacggataagataaaagagaagagagaagacaagtgagttacatatctgtatatgtgggactaattattaataatatagtatatatttatagttaattattgtataaattagctattaatttaactatggatggtattaaacttgctccaagtagtgctacaggataatttggcgaggtaggtgctgcagcattacatctgagtacactcattgttgagctaaaaaaaaggggctcccgtgaatggcggttacttgtctccacgttgttaggcacgaaatcatcatccaaattcacaagcaaaattgctccctaccctttgcagttgcagtgtttcatcattcgagcgcttttaattcacatcacatgcttgcatatgcgtatgagatgaagaggatacagtgctcgtttgtacgcgatgttgttggatgagagacatcggtcgagcacatttatgtcgcattctctactcatcaacatcatacaacctactactaactccagcttaaaacatgtagagctgtttacttttaaaacataatgctattccattcctttcatgatatatccattttgatgtgatttgtacgattattaaagatatttcaggtatgagttatatttttaaatacttccactaaatttttagataaaataatccaacagtatcccatggtgactttatcaatctcaagatacgccagctcagtttttttagagatgcttatagagatagggtgtgcgtgtatatatttatagaggtgagtgtacgcgcgttgtgagcgtcttgcatttgtactgtgttttttaaaaaaaatatttaaaaatcgagaaaatagaagcattctccgccgttgataaattcttccttggaaagacctcgtaacacttccttggaagcgttggcacacaaggtaggtaagcttagctttgagtctttgacaacccaagatcgatcacgaggcaaccgtccaacgtccagtcgtgggggccaacttcttctgatcgaccgtgtggctattttcgtcatttttctaatccgccgttggcctaatttgacaaggaattaaaaaatggatctcacactagagaatgaaataaatgaaattaaaggaggagaaacctcacagatacgccaccgaccaagcatcacaggctggaattccccgaaatgccccctccctcctcttctctgctgccatccacgagttggatgagttgtgaaaccgtgtaccagcacggaatcacgaggccataagctgccattaattaatactatattccaaattaaaactagcccctcgtatataagagcgagtttaatattatagccaactactaactttaaatcatttatatttaatttaatagccgatttatacaataattactacaaatatataatacactattaatacttgatcccatctgtcatacacatatcgtgtcttaagatccgtaatagagctagttataaatttttttaaaatatatttatagctgtcttatcgtttgcaattatgagtacttctctaatgccacagccacaaacgctgctgctctttccttctacaccgggtgttattctaccccaccgctcaccgacatggtggggcccacctaatgatccaagcctggtggggcccgcctatgatctaagcctaacggcgccctgggtcgttgggggcggtgacggtgaccgcgcgtttccagttttccgtggggtgtcgcgggccccaccgcgggtgcgtacccacgaacagcgggtgtaccactagaaaacaaaataaaagaaaaacggcaaatggttttatatttttcttttctccctctaccttatgacctgctaaatctggtttacccaatgagttggcgccacgttggatgcaaaaataaaatctacaggtgtcttagcggatccgggtttttgcgtggcttcgcgggtccaggctccgaactttctttctacagccacacaacacacagcacctactcctagcttgtccccaagaagtaagcttacccaccacatacaaggacaaacggtgtatacatgaattctgaattctgtactctgtatttcgtaaaggggaaaagttacatctttttatactttttgcacgcttaatactaatctttataaaaaaatatgttacgaagtgccgtaccttaaaccaagcgatcgtcgattaaataattatagatcaaacaatggtacgaagtgatgctccctcttggctatccaaatggtatatattatcagtaagctaagattatggtacagctataattcgattataaagttgtaggaatccagaatgacaagctgtgtattttaactttttaagaagttagtttagccatgaagcatcatccttgcgtgagggaatgtaagggaattcaactagctatacatagtgaggcacacgagtgacaaaaacatagtgttacttaagtttgagactgcccgaggactgaggttcacgtcaaacaaaaccgattacacgggagccacacagtacctactcctagcttgcctccaacaagtacatcttacccaccatgtacgaggacatacgatacggtgtatgcatgaattttgttctatatgtttcgtaaaggggaaagtttcatctttttatactttttgcacgtataatactaatctttataaaaatatgttacaaaattctataccttaaaccagatgattatcgattaaataattatagatcatacgatgataggatttaggaagtaatgctccctcttggctatccagatggtatatatgatcggtaagctatggtgtggctataattcaactataaagtagtaggaatacaaaaggataaaaaggatgcattttaagaagttagttcatcatgaagtgccatcttctcgtggtagtgatgagggattgtgaaggaataacaactagctatactaagcaaataagtcaatactatagtgtcacttaagtttgaaattgcctaaggttcgagtcaaacaaaaactgatcataagagcaaggtcaatagtatagtctacggttggctccaaaaacatccacatcagcaatacaattaactagtaaagataacatacacagtaatgagctattagctcttctatccataaatttgcatgtattacttttcaatattttaatctactttttcagttactgacagacctctgtttctgcatggtttcacttggaccccacctcacaaccgtgtggccagtagaagcttatctagagctgctttgcatgcgttggagcccttgtgtcgtcggcgataaattagtcgcccactttcactctctctccacttatttcttctccagatcatcacttttgccaccgtgtatagattatcacccgcttaaacaacctattgtacctgctctaagagtgttgcacgtatatgtgcatatcgttataatcgatcaataaatatttttttatatatattctcatttgtcactctatacgtgcaacaaatgtaaatttatagatcagtagtaaaacaacatgaatagattacatattaataaatggctccataccacattttaaatggctggcggtttttataaggtcatgacgtcatcaagctgtcaacatgatttcattttcccgcgcatttgtagtaaactaaccctctttttccacgttcgacatatagtcatatacaccttataactacgtgtgctataccattgctacttttccacatgtatgtcttgaatgtctcttatttatcatagttatcatcgtacactccaaactttagataccattttttccgtgctctcttcttagaatcattagtcgcgcaagagaaccatctaaccattttttctacatggtgtacagtcacattagtgatcacgcgccattatatatatatgtatatatacaagaaaactatatataaagttgtttcgtgtacacataacctattcggagcatacagaaacccaaaacccgctaagcaaatgagaagggaaggaaaggatgaaccgaaagacccggaaggagaaaaaatgcctcagactacaagcaagtagtactagtagtagtaaacgaaaacccgaagaaacccaagagaacaaaaaaaaaaaaaaaagcgcaggcggcagctgttcctcctcctcctcctccccgctcccctctcccctcgccattcacattccctttctccacgagagcgaggccaaaacatccggagaagagagaggagagggagggggtttggactttggagaggcgccgccgcgaaacccccgcggcgcaatcgcggagagctctcctcctcctcgtcgtcgtcgttgttgccggcggcggcggcgctctgtaaggcggacgcggtgcatttcgtcggggttgaacggcgggggcgggttcggaggcagtcggggggcggtgggagatacgagcagctgttgctgctttcgtgggtggaggggttcggggggttcaccccccctccgatctcgcggttccgcgtcggcgattcggcccccccgccggtgattggatctcgccggcggccgagtcgtcgcggctaaccccgcccgtcgtcctcgaggtctcgcgcggcggacgacatcttgacgtcgtcgtcgtcgtcgtgttcatcattccctcgggctaagtctggaggagtagcgtggagcggagatccgcccggacctggattgatttccttcgatggtaaggaagccctagctttgctgttccgttgctctagagtctagactagacgcgggtgatattaccctactgggtactgacgctgatagcacctttttgatttcccacactattttttgagttctaactatgccccacgttaggtccgcgcccttggatagttaggctgtttcagatgggaaatgaggacgatgttctttttgtcccgataaattattattgtgatattattccttttgatgaaaaaaattattgtgctatggacgttgacctgtgtgttgctacccttaagatcaagtgaccaatatgccacgctcttgttcgcgccagaaaacggtttgctatacaactgctgtaatgaatgtgggatgcatgggtttcgttgacattttaggtataacgctatttttcccgcgtcgagcaatatgcagctagcgtttgatggcataaatttattcctgcaggcggctcaagctaccattgtggtgggatcccaggtttgggttgaggatcctggtgttgcctggatcgatggggaggttataaaagtccatggtgacacggttattgtcaagtgttccaatgaaaagacggtaagttgttcataagtaattaggttttgctatagtatgaccagctggctactatattattgctagatttgtaacagctaggcagctaggagagaccatgtaaagatgagctgaactgaccttccataatagcggtatttacacttaagttcaaatttggtcgttttgttcaggttactgttaaaggttccaatgtccacgcaaaggatccagaggaatcaccatgtggagttgatgacatgacgaagcttgcttatcttcatgaacctggggttcttcagaatttgaaatctagatatgacatgaatgaaatatatgtaagtcttttacactgacataatgtgactacgcttctctatatgtttttaccaatgctaccattttaagtgcagccatcattcttctctaacgcatgttttcaacttatttgtgttgaaaccagacatatactggaaatatcttgattgctgtaaatccttttcgaagactgcctcacctgtatgatactcagatgatggaacaatataaaggggcagattttggtgaattaagtccccatccttttgctgttgcagatgttgcatacaggtaggctcattatgatatatatgttgataactacaaggtggtctacgatttaaatgggttagcttccataaagaacttcttttctcctttgagctctactgtgagaagaatgtctttgattactggtgtagattgatgcttaatgaaggaataagccagtcaattcttgttagtggagaaagtggtgctggcaaaacagaaagcactaaaatgataatgcgttatcttgcgtacatgggtgggaaggctgccgctgaagggcgaactgttgagaagcaagttcttcaggtgataatttctgagagccacctaattccagaaagctatttccataaccatctgttgttcctcttcaactgattacttcatattcatattcctctcagtctaatcctgtccttgaagcatttggaaatgcaaagactgtcagaaacaataattcaaggtaggaagcattcttcatacgatcattatgattcaatatctgtcactcaaccaaatcttcttttctctgcttttattgcagtcgttttggtaagtttgttgagatccagtttgatcagaatgggagaatatcaggagctgctgtcagaacttatctcctcgagagatctcgtgtctgccaaatatctgatccagagagaaattatcattgtttctacatgctttgtgctgccccacccgaggtgctgccccttgattattcatgtccttctttgattagacaaatttatgtaaatagcatcactatttttacatgctgcttacactatatgagctgttatatatagtccatttttcagtttgacatgacaatagcaccatcctaaatgttaccacccaagataacctatctagaggcttatctgtattatttgggaccaatagattgacagtttgatatactctttaaatcgattgattcccaattataccacaacttacatgtcggtcagcatgaaggaataccgtttcatatggcacacactgtggtgtgaataaaatgctttattaagcttaaaatttccagtttcccttgctgaagttctctcttcacgttgtatcctgttctctgttagattgataacagttatgaatctaattttggttcatgaaaaccttccgtcgacatgttcctctagaggttcttctccactttgtagcttcacaaaatactaaatgctgtaagcctgtagcagcttctgcagcctaaaatactgtgtttcatatactagtgctgaatgattcagtgttccatctacaggagcttaagagatacaaactgggagatcccagaacatttcactatcttaatcagtccaactgctacaagcttgaaggtctagatgaatctaaagagtaccttgaaactagaaaggctatggatattattggaatcagttctgaagagcaggtatgcacttggttctataattattaacacataccattttttaattacttgaagcttatttacccttctcaaactttacctcatgtttttcatgatgcttcaggaagcaattttccgggttgttgctgccatcctccacttgggaaatgttgagtttgctgaaggggatgatggagagtcatcaaaacctaaggatgaaaaatcactgtttcatttaaagactgccgctgagctcttcatgtatgcggtctttggattccttttagaaactcttgaatgcatacacttatctcacaagagcctcaaatttggtcttgtaggtgtgacgagaaagcacttgaagattcattgtgcaaacgtattattgtgactcgtgatgagaacatagtaaaaactttggatcctgaggctgctaaggggagtagagatgcacttgctaagactgtgtactcacggttgtttgattggtgagtcagttttgaagttttgcactggctgctaatggttgtttccacacatattttcaccttatgctcatgtgtcaaatgacctttaatcttaggcttgtggataagataaacaaatctattggccaagatccaaattcaaaatgcttaattggagtgctggatatctacggttttgaaagcttcaagacaaacaggtgcttcactggtacgcttttgatgattgattgcatgttagttgtaatcttgtcaacttattggccagcgagaggaaagctgttgggttagccccaatttagttcttggtaataaatggtgggaatttggcttcacgccttactatgtgctgttcagggcatggcttctagaaacttttcgtcaccgaaacacttggtcccagttgtactagaactaaagctatggacgcatggaagatgctacactcctgggcttttcctttgatataggattacatgttaaagattcaggatggctgtattttatggaaaatcttaaatattgcctgcaatatttgccttgaatgcagcactttctctgaaacatttcctgaagaagtgcaaaatgttggatccagagtattgctttttcatgtttagtgtgatcttactgtttcaaaaagttaagataggtagtagtgaagtagattctcagaactattgttattttaggttttatacactatgttcttctacaatccaagatattaccacattttatcgtgatgcatgggattttttgttgcttgttactccctccattccaaaatataaggcacaaccacccttaatccaaagaccaagaaataattattatcatcttgtagtttggatcatgctaataaatacaatgcatgcatccaatagaattagaggatgtgagagtgaaggatttaaagaattaataatttaatggagaagatgtcatagttaattgcatgcatgcttgcatgtatgccttatattatggaacatataaaaaaagtggttgtgtcttatattatggaatggagggagtaattgtttcttgatttttatttatctgttttttctattatttctctctaattttatgaatttattgtagttctcatatctaatgcatatttctcttgatattgatagtttcgaacagttttgtatcaacttgacaaatgaaaaactgcaacagcacttcaaccaggcaagttttctgttttttgttgttatcacctacgcgttcatttctgctgacttatattttttttaaaaagatatttccaactttgaatttcttcttttctgcagcatgtctttaagatggagcaggaagagtacactaaagaagaaattaattggagttacattgagttcatcgacaatcaggatgttctcgatctcattgagaaggttgctttcttggccttgaatatatatatttctcgaaccttgtgatatggttacgctaagacaaacctcgatgaaaacaagattgctctctctctctctctctctctctctgatgaatttatgtggtctcgttcaaaatcttccttgcataattttaccaaatataatcgtagatgcaacagaccttgcaagtagcaagcaaatgtaagtgctgttgctactataccttagctccaattcttggatatgcaggctgctactcgtatgtttttttttttcgtgttactgaaactcgctggtgatgtcatgcttttatattctgcttttttttttccactcccgtctaagtatttgattattcgttcacagaaacccggtggaattattgcccttctagatgaggcctggtatgtataactgataataaatcattttgttgtttatgctggtcttcaagcatacagcatttcagctttacaagaaattgatctataaacatgtgattttgtgttacagtatgctgccaagatcaacacacgagacatttgctcagaaattgtaccaaactttcaaaaataataagcgctttactaagccaaaattatcgcgatcagacttcaccatatgccattatgctggagatgtaagtatgaatacctttactttctttagttttcatagttcttttgatcaaatctaagttggccaccttttaatttgtaggtcacctaccaaacagaattatttttggacaagaacaaagattatgtagttgctgaacatcaggcccttttgagtgcttcacaatgttcatttgtctcgggccttttccctctcctctctgaggattcctcaaaatcgtccaagttttcatccatcggttccaggttcaaggtgcataacaagtcacataaaattcttcatttggatgtctattgcttacgattgttcatacttttaatacatatataatgcaatacagcaacaactgcaatctctcttagagacattgagtgcaactgagccccactatatccgctgtgtaaagccgaataatatactcaagccatcaatattcgagaaccagaatgttcttcagcagctaagatgcggagtaagatttcctgtttcacatatttttttgcttccaagttccaacttcaatatttacattattggcttgtcctcagggagtaatggaagcaatcaggataagctgtgctgggtatccaactagaagaactttctatgagttcatagatcgctttggtattcttgcgcctgatgttttgagtggaaggtattaccagtgttaacctgtttctttgttcagtttgttgagcctacttaccgatgtgagtttgtgttcattttactagctctgatgagattgctgctgtaaggaggctgttagagaaggtagatctgcaaggttatcaggtaatggatgttacacagaaagtagcttttgcattgggtgttattgatctgtgataattgatgctcagtaagtagtatgctctgttgccatattgttgattactccttccatccacaaatgcatagctttttggacaaacaattacttaaggcatcctcattctggtacacttatataataaactctaactgctgttgttgaaacagcagtgtctagcatctcagaagcgttggtccattgtggttgaggtgctaaacaaactgtactgaaccagaactactgtctgagtgtctgtattaagtatttggagccacatagtgtcgtgttagttataagacattaccacccgttgatcattataattcttaacattttttataaaaataatgcctcgaagtgcaagaattgttctctcctatagaaatatctacttgtgtagagcataggctgcagcagagctgaattgtttagaacaggatgtaacatatgcattgtaagtgaatatttggaggtctatctttaccagtattgatatgtggactaaactgcatgccttttttcaaatggattatgtagattggcaagacaaaagtatttcttcgtgctggtcaaatggctgagcttgatgcacgtagaaacgaagtgttaggacgttccgccaacatgattcaaaggaaagtccgctcatttctggcacagaaaaatttcattaaactgcagagatcagctgtacaactgcagacgatttgtcgcggtgagattttcatttgttattccaaattgaagcctctatgtccccagttaatttaaattttgttcatgtcataaaaatttctgacatggcttccctttcatatttaaaggggaacttgcaagaaaaatttaccagaatctccgcagagaagctgcttctctcaggatacagacttgctatcgcatgcatgctgccagaaaagcatacaatgaactttctgcttcggctgttactatccaatcagctttacgcgggatggttgcacgtaaagagctccatttcagacaacaaacaaaagcagctattgttatccaggtaaaactgagaaataaataagcttgtttcatgtgtgtgtgagcacatgcaaatcgatagtagcatggaatagtaatcaatataagtattatgattttctctccttatatttaaggttgatatttgattgacagtcatcgatagctctgaaactgcagggaacatgcttaggttgcatagattttttcttctagtcttagacttaagttgtaatgctattactgcctggacaacttcctcagataggggctagataaactgataaaaaaatatgaaatctaagtttcattgggaggtatagtttatgaaatctgtggtttagtaaatagtaattaagactagaacatacttccattcacctttgttagtttcatccttgaattcaatagctgaaagcctgtttgctatgcagagtttgccttttagactacaaacagtactccccgttgaatctttctccaaaatatgactaactgtacatatagtgcacatatagtccacaatactaacatgcagacaatctgcaataatccttatcagatcctatcgacgcttttttcttaaactttgtacttgttcaaatttctatttcagagtcgctgccgtcagttcttggcaaggttgtattattcaagaacgaagaaagctgccattactacacaatgtgcctggagaggaaaggttgctaggaaggagcttcgaaagctcaaaatggtaaactcaagcacaccagtcatttgttatgttctatctatgctatttcgatgaaaccatgttaaggtgtcccttagaaattttggtcaagaaaaagtttcaactggcccatttttttgcaacttctggaacctttatattgtatgtaggatagtgtacaatattgcacttgcagttacagatgttttgctatactgctgtgtacatttctcagtacatggtatgtttttataggccttagtactttgcctattacagttctctattgctactagtgcgaaagccccctagtgatagtgggatatatcaaggaccagcttttcttatccattttcattgcttatcaggctgcacgggaaactggtgctttgcaagctgccaaaaataaattggaaaagcaagttgaagagcttacatggcgactgcaattggagaaacgcatgcgagtgagtttatttctataaattctcttgttaatgtaacttgaagaatactggatggcattgttacattgttttctggggttgaaacaccaatctgtactctacgtgctatttaacatacacaattacacaaatatgatctcatggttcatggttgaactggctgtttggttaccttctacaaaaggactcagcccataactaattcactatattggtttaagcactcaagcacacagctgactgtccatgaatatcaatatatatatctttctgtccatgatatgagtgacctatgcggtatattcaccatatgacctaatagacatctgggaaatggcaagggagatcttgttcttccctggtagtaaaatgaaaaaaaaaatgtatagttaacttgtgataccttattattacttatgcatgggtctttgttgtaggctgatcttgaggaagctaaatcacaagagaatgcaaagttgcaagctaccttgcaagaggtgcaacaacaatacaaagaaacacaggaaatgctagtcaaggagagagaggctgccaagaaggctgcagaggtggcaccagttgttaaagaggttcctgtcatagatactgaactgatgaataagcttagagatgaaaacgacaaacttaaggtgagacctgatcatattctagattctcttttttgtctgccccattgacaaggaaatgcattttcttatttcttaggacttatactataaaataaatctaatcattcttaaagagatttgtttcctgctgccattctagctccatgcgatactacctctgctatggatataacacttgacattccattactgcagactctggtcagttctcttgaaaagaaaattgatgatactgagaagaaatatgaagaaacaaacaaaatcagcgaagagaggctacaaaaggcaatggacgctgagacaaaaattgtcgatttgaacatggcgatgctaaggttgttccattttctgaactcaactttattgtagaagtacagtggttgacatttctttttgttattctgcttcaggcttcaagagaaattatccaacatggaatctgaggagaaggtgcagagacaagcactgttgagctcgccagtcaagagcatgtctgaacatctgtcaattccaattgttccaaaggtacatgtaatggcttgcacattggttaacttttgttccctctggctgaaatgagaatgttcctttactcacatctcccgctttcttctctattaatcagaacttggaaaatggcttccatgaggttgaagatccaaaggtttgaagttttccaccttaaatattccttttgttttgaaacttaaattttctgtctatggtctcacaagtcacaacaatctgtcattttcaggaaccccaaagtgcacctcctgctattaaagattatgggaatggtgatccaaagttgaggaaatcttgtgtcgacaggcaacttgtaggtcaacatatttattgtttaaattgctcatacaaaaatggttacttgactcttatctttctgtaggaaaatgtcgatgcacttattgactgtgtgtcaaaaaaccttggctattgtggggggaaaccagttgctgcttttaccatatataaatgtcttcttcactggaaatcttttgaggcagagaagacaagtgtttttgaccgccttattcagttaataggatctgcaatagaggtaatctggaacctgtattgtggtctttcagcgttacttgagccagaagtacaattagacttcttttatatatatatatatatataaatataataagtggttattatttgaaaatttaatctgagatcctaccagcatcaaaacatctctaggctttatctttatgttatataaaagtagagctgctctcttaacaagtttccaatttcttttacaccctacattttccactctactactctagttgtctagaagttattctgcgcttgctccattttcctcaaggtattggagcatcagctgaagtagcaatatgccacttctacccttgaatgaaggcaaagccatttttgctaataaatcaaacaaaaaactcaacctgtagatgcgtgaaaactggcatggttttggaaatattacaagcatggagatctaggccacttcttagtacatggaagaacatgctacttatttggtccaacattttcgttttttccaataaagtagaagaaaaactaaaaccctttcagattcttgaaaactgggatggtacaggaaagacttgaaaacatggagagagaatcaacttcttattacaccaatctaattggtttttgttttctaaatttgtattcctcagaaatcaataatgacgtcactctgttctctggcatttcatttattccaatccacagtttatttcagtgatactgttttgaccttaaattgtaatctgattgaattttggaagttggcaagtttctttggcccccagtcagcttacgttgtgaagcccttgatgcagaatgaagaagataacgataatcttgcttactggctctcaaatacatctagcttgctgttcctacttcagagaagtctcaaagctgctggtgcacctgggagtgtttcacgaaagaaacctcctcagccaacatcattgtttggcagaatggctcaagtatgttactttcttttccatgcatgaaaagtggaaggaaataaaatggaaaatgtggtacgggctctgataatgtaaattcacttgtctagggcttgcgatctgcatcttttgtcaacatgcatgttgaggcaactgatgtcgtccgtcaagttgaggccaagtatcctgccttgcttttcaagcagcagttaactgcttatgtggagaagatttacggtatcatccgtgacaatattaaaaaggaattatcatctttgatttctctgtgtatccaggtatattttccttttggatctttgctgtttgttgataactggctgtaaatggattcattgtttaccattcattttgatctttgttaaccactaggctccgagaacaatgaaagctagcatgctgcgaatgtctggacggttatctggtcaagctcagagcaaccattggcagagaatcatcgagagcttggatatccttttgaagaaactgcaagataaccatgtatgtgtatttctttgtttctatgcgattcacttctgttggatgtatgcgctaactgctgctttgtttatcctcaggtacccccagttttagctcagaaagtttttacccagatattctcatacattaatgtacaactgttcaacaggtgaacctatatttcaagttttgtttcttgtatgccgggaaacttgcgcagtacatgagtacatgaatgttttttgttctgcagtttactccttcgtcgtgaatgttgctccttcagcaatggagagtatgtcaaagctggtctagccgagttggaattatggtgtgcaaaggcaacaactgaggtgatctgtctgtgtttgaacgctagctttccctcctacatgattcagtttactgaagctccttcatttttttttcatacagtatgctgcagcatcctgggatgagctcaagcatatcaggcaggctgttggctttctggtatgatgtccattctgcttgtgtatatttgtgttgaggtttggcaccaataaaatgttgtagttttgagaatgttatctgattgtccgattaatcacgattaatcgtcctgatcgctcccctacctccgatcaggcacaggtaagtcgatcagccgatcagaaagctgatcatccgattaatcgatgattagtcgcaattaatcgtccgatcagggtggaaaacgatcagttcatgggctacctccctgagaaaatataattttgggcctgccagcccagcccatgttccattttgggcagatgacgggcagcaaatgatgctgcttcttcttctttgaccaaatgatccttgctttttaccatatactacagactatagagtatttagtatataatatatagcatatttggcctgctggacactcttgctatactaaccgatcagcctcgattaatcgccctgatcgtcctggtcggtgcctaggcgatcagggctgatcgcccgatcagataacactggtacttttgacatcctatgtgcatgagtggcatcctagaaccttgctttatttatctttggctttaataagcttcatagctttccatgaataaagcaaatgataattagtgttaatccagactgatgttgccctgtgctgtgtgtaattggcaactattaatacattttcaatactcttttcaggtcatattccaaaaattcagaatatcttatgatgagattgtcaatgacctatgtccggtaaaatcacattaaccgcacttttcaattttgtcgagcatcttttctgtttttgttccttaagcaaattggtgctaattcatgctttattgttgatatctgtagatcttgagcgttcagcagctgtacagaatctgtacacagtactgggatgacaagtacaatacccagagcgtatcatcagatgtgagttccattcgttaaaaaaaatcaatatacaattatgcatgtggcaatgaaaatctttccatttgttgactgctaaagtacattttcttttcccccttttaaaagaatgttgtatatggaattgaaataacgtacatacacattactgcttaattttaattcctggtcaatgtagtatactgtgcaggatatcaaaagtgaaaagaaaacttaaggtcatctaatgtttcaggttcttagtaacatgcgggtgctgatgacagaggactctaataacgctgaaagcagttcatttctgttggatgataattcaaggtaacataagtaccatttgatttaattgtgtggatgtatctactgtttatattagtccctggacaaacattaacacacccctcaatttattgttgtgtttgcaatgcagcatcccgttctcagtcgatgacatcaccaactcaattcaggagaaggacttcaccgatgtcaaaccagctgaggagctactcgagaatcccgccttccagtttttacaggattagggctgtgaaatctcagagctttataccgttagataccttgtcagaatattccttgatttgttgtaaatttttttcaatcctttacgctggatggtgtaccctttcttttgttatatttccttttcttttccagctagttttttgtaaaatccttataggtagtcaatagggttgggatgggattcctcccttacatctaggaaaagcaatatcttttaaagcaaggcaggcaaatcattcttttgtagggcaaattcaaatcagtcttataatatccatgggttgtaggaagaggcaatgtcttggtggcctctcccagttatagattgtacaaagttacaatgtatatcaacagtgcaagaaaaggaaattcatataccaaatggcattatgctcatacatcatatcttggaggtgttgtcttgtttaccagatgcgctgcaatctgcagtgactttttgttactctttttgagagaactaaactgcaaatacagaggatgtttcgtaatttcttctgcgtctttttctggcttgtggtgtctaaggtgccatcgcatggaaggaagttgtgtagtttctctatgggtaacttcggtttgaaagtagtctgagcaatttgaatgtagccttgtgtaaactttgagtcgattctcatcctccatgctcgagcaggtacgtccgtcttctttcgatccgccgtgccttttccttccattcgttttgaatttttctggaagagttcttcatttggatttgaaggaaagttacttcaactggaggggagcacgggaaacccgcgaactttgctgcacagtcccaaatgcccacctgacacccctggcccacagctctaaagcgtccaacatcactagccaattccctaaactaccctccctcagaaattcctccatgcatggtttctcgggggtatttccgtccatccacacactgaacgagagagaagaagcaacaacaataaaccgatggcaggtaggcacaccgcactcccccattcccttccaccctctcccaccctttaaaaaaataatacaaaaataagaaaaagaaggagaagaagggagattctctctctctctcctcctcccgctcccgaattccttctagattatcccaaattcttcgctgccaagccgccatcccgcggaatcgaggtaatggttatcttccccccaagtttgttcgttcgttcgttctagctcgattccttgagcggattgtttcgtttgatttggtttggtttcttctagcgaggggaaagggtaggaggagcctgacttgctgtggaaggtggttagtttggggggggggggggagtggttgcatgtgtttcttttgcatggaaattttgctcatgcctggtgaaagctgtggcgctgatttggagctcggagtttgtatgtagaattgtgaggattgattatgcttcgtgggatggttgcaaggaggagatgttgtactatttttggagtagcaatgctctctagtgtatctaaacaagggaaagtgggatgggggaataccacgcatccggctcaaaatgtatgaggggttatctatttagggtaatgataatgcttgattgatgggtggggtactgggttaaattttcctaatgtagatatgtgcgtcactttctgaatggggttgtcttagctatctacttcttcacaaggtgttgatctgtatttgaatggaaaaagattgaggttcttgttcgatcactcaagtttaattcactgatagagataagcagctctacttttgtaattctagaaagttgaaagagaatgttttcaccaccatcttattccctgatgtaggctttcgcttaagtacacttgtcattgttgattattatcctgctcagggatctaaataatgaaatttcattcttgcataggtgctgttccccttgcctttgcttcacctcttttgtatcactaccggaactttactcacagctgctcagttgtttctttgctgtcagcatgggggaacataccttgtacattatatacagcttgatttttgttttatcacattggctctttcagggatgagcagcaagttcatgataacctacaagaggaagcgtgttacatcacatgtctatacagctgatggcaccaatctcaagtcttctggtgcttccagtagtgttcctgtcagcagtttatccccaaaatatggggttggtgccgataataacatgttagaggaagataattttgtgaggaaccttgacttgtcacccttactatctattttagcatttgatgttactctgttacattcctaaagagggtgtacaatacataactactactgatatgcaccacttccacaaggagcgcatgaaactgccatgtcaaacagtacaacatgatgtagatattcatatctagaaatgtcactagtcatgttttttcaggaatctaatctatcgtgctttataataaaaaatcgtttaatgaaaccatgatatatgtttatgttttaaaactgctgtgtgataaagttccatgccatactaaaagtttgttctgtatcactgtggtgtgttaatgttcaatgctggagtatatactaaaattttgtatttttgtattcataagttgatctaactttattcatatctgatacttattctcatctataaaattggcagtcgacctctacaaagcaacaggatgtatttgattcaagggagcaagtcatcaaggaagaatcacctaaacaaagtgcaaatgcaccaggcaaagaacgagcggaacttaagtcacgtgaatcattatctcaaaaggaacagcctgagatatgttctactcatactgcaataggagacgcatgtgagaataaattagaatgcatagatggcacacataatcaaagtcttgtttccagttgtgtgcatgctgacaggacaactaatcaggcagaagattctagtgcctctgtttctgtgggagtaaattctcatcagcagccgaataattctaccaggcctagccaatctaagagtagatttagtcctatgcttacatttcataggcgagttaaaaacaaaataggtttggaagagcctgcagcaggaagttgttcaagagataatgacaaacattgctcaaaactaagttgcaacccaccaagttcgccactggatgctatacccttgtgtagacaaactgctggcagttctttggatgttgaagataaggtatgtttctctctcatgacctcatcttcatgtactcgtacttgtacaataacagtactgctaacttgacaaaatttttgttaagcctatccatttgttttacttgttcattctatgcgactatgtgcaatactattgcaagtgcacataccagtgtcaggaaataatgcatgttgtgactgcaatggctagaggcatccaacattgtccgtgtaacttcaactgaaagcttctatgtgattcacttatgcaccatattctagattcatgtcttttcttttataaattcttcaaataaaatccaatgtgtgtgtcattgcgactgcattctctctactgcttgcattgtctatacacaatgaggctacactcctgatagtttatgtgttcattgactatgtgcttttgcattttaccacgtagagcattcagaataactacagcttctatttaatactgaggaaaaggaatttatttacaggttactatagcgggaacaagcactggacaatctgtaattgttgaccacttgcttgaacaaaaaaggtaagacggtactatttgttttgttgatcagtacatgaacccggaactcattaatgctccttttctagttcacacattccgaaatcgtcggtacatcatatggttccctcgcagcctgctaaagatgcaaaccaaagttcaatcccagaagaaggtacaccagtatctgagttcactagggtgctagaaaccagtgagtcagatgcaagagtggaggactcaaacagaacaccagtagacgctattgaagtaccaaaagttattgaagtgaagagggatgaacatggtaatggacagactaattgtctacagtcaccaaggaaaaatataaatgttaatcttctgaaaccaacaaatagatctgaggcagctgatcttctggagtctcaagattcaacaaaaaatattccaattattgtcttggacgatgatagtgatgagaggggcaaagagcaggaaaaatcagaggtccttgatcaattaatccaggagaaaaataaaggtagattttctttggggcagatcaacctaaatctaaattgtgctgaattaccacaagagaggcttctcagtttggatgagacatcggtgtacaaactaaaagatcaggtcagaatgataatattagtctatatttcatgaagtattaccttacattttggctttagtccataatccacattcctcatcttatttaaagagagaacttctttctgcagtgaagtggtttgtacataatacattctgtaccgttcattttagtaggattgggtgttctgtttctttatacttgctctaggtgttcagtaaactgtatcctatgtgctctttatttgaaccactatctagtttacaagctattgttttgctgatacatgtgttataaaaaagtgcttacatatgctttattggataagtccttgatatttgtgctttgtattatctcaagcattttatttgcactatttacaggatcaatgtgttcatgaacgaaagcaaatgtcccatccagttgaaaggttgttttttacaaaggagaaggatgccatgcacggtaaaaaacatcatgaagaaacctcaaccatgcatagctcgtactcaaatttatttgatccagccccatcatcgtcgtggattactgggaatttcaaggaaccaagtgtcatgccatcagaactgaagttcagaatattggataaggctcctgaattcaatttagatctcaaattggatagtttcccagacagtagtgtattagcccttaggcacgataagttatttcgtggaggcacctccagtggatcccattttctgacagaaaggcttgggacatactcctacaaaaggcactcttccccgtggtcagaagaagaattggattttctttggattggagttaggaggtatgggacaaataactggaatgcaatgttgagggatagacggttacggttttctaactcaagaaatgccgaggatcttgctaagcaatgggacaaggaacaaagaaatcttctaggtgtggatttccttcaatcactcagatcctctgctcgaggtcctccaccgccttcacatataccagaagattacgttggaagcagttcttggactggatgctcaaaatctccatttctttctgctccaacagacctttcattgggtgacatgtaccttcgaagcgcccgtacttcagagagagggcagcatcatttatcaaacctgggcatgttaaacctacatgcaaccgacaatgtaccaagaaatttgtctctgggaggtttccctgttgcttcctccccatatgggagaagttctagcaagcgtaggagggcgtccaagcttcccaagtcatactatgacaacaaggcagtttggtgccaagatccatcagagagggtggctcagttccttcccataaaccaggaaccaatcaacaatcttcctgagtggctgacaaaggacgccgagatggcgggcgtacgccggcttgatgcagatctgtggccgagcatgcaggctccgggtcattctgcagcagaccgactgaatgaaatgaagcctcatgttcttcctgatggatcactgaagcgtgcgcccaagaggaaggcggagtggcgcgccttcagcaagaaactgttcaagtccggcgatggcgccctggatctaaaccagagggctgctgccatcgccggacccctcggtgccattgggactagtgacaccggtgcatcgtctgaagagacggtttcagacagttgagtgtatctctagtagtagtgatttagtccagaaaaccttgtgtcagtctgaagctgcctgtatgattccgctgctgaagctggtaaacagtagcagtatgatcaaaggtaaaatcgagttaaatttcagccaagtgattggattcagtttttgtaaacatgcatcgatctgaattctgattacatcctgtgtaatatattattggcttgtgtaatccaaaaagattgaaccatatatgctcgcatgctgaaaaggaattgcgagtttttgtgatttgccatgaaccaattggtgatcatccatcgatatgaagtttactgtagactgggcatctcgagtaacaagttttttttttcaatcacagtataatgttagctgatgctagtatgtcttgcacagcttagtacttttatcttatggcaggcttggcatcattggccataactgagtcgagagcatctggatgcatatactccctttgtcccatggtatagcatacagtatgttttagcccttaacatggctattaaggggagagagagatatatagagttttttattcttcttttttggtcttaggatgaatgaggtgtggtgttggtttggactagttggaatgataacaaaatgaggggttttttcaccaaatgatctaattggcccattgttaacgaaaaaaaatcgaacacaccggcctgggagatctgcttagctcctgtgcaggtccaaagattaatgagatgcgggcgtgccagtcagtttaatcctgcaattgacaagatttgcaaataatagatcaaacagccgatcggctgacaagccgatggagtagttccagccgatagccgataatagccgatgccgataccagccgatagcgatagggtttaagcaatcggctatatgtcaaatgtagatactgatataaaggccaatggctgatgatgatgtaatatagaaatataatcctgcataaaccaatcagctaacaatatgatatagtagaacaagtattgatccgaaggttaaagcacccatcggctggaggtccgatgtcatgaaatccacaagattaaattaaacaatgaaacctttgttgccatcggctaaatccaacttatatgtatatgcaatccttatgagccgatgcaacgtccagataactcaccagctgaaaccccgatgaaacccttattggcaatcaataagcaggctagagattatggttctaagcacgacttagtagatcaaacttaactgatgcagcactaagtataaaaagaaacacaatatctagacaatcaagccgttgactgattttcagggtggtagatgcctaggctaatctaatctagcaacgcgatttagccgataccggcagaaaccctaaagcgagagacagccgatagagctaaattgatatgctaagactagattaacatagacatgataaataggtaggcaaatatatcatccaaaccagagcaatccaagaggtcgaatgcactggtgcaaccttgaacgacgccgatgtagatgagacaattgcctggaccgacggaacattggacttatcccttcgccggagatcgaagacgatgcagccccgcgtcgggtgccaagttccgccggaacgtaaaaaacgaaagtagaagtaaaaagggtgccgatgcgccgaattgtattgatcgtagcgatatattacatagaccccgggtgtacatatttatacccatgggttgatacaagtccttgtcggacaagaaagaaactaacctaaagataaaaaggaaaatataaagtccttatcggacactaaacacactttcctaaagataaaaggaaactaacaaactattcctaattaatagataaattgtcatgccgcatcctctttaaactcggtaacttagggataagcttcctttagtagattgatttccttaaccgaatatagcaggaatccgactattgacgactttataactcctatcggctgattccgagatgctgcagctgataatgattataagccgatgacgtctttgccgattaccaaatttcactgttaacacccattagccctacccgagtttgttgggctgggctgggccgggccacgccaaaagcatttctccccgtggatcaagtccaagacaagagtaaacaaggcacagcaataatacaaataataagtacaatgataagtaaataaaatataggcaaatcggtttgatccatgccaacattcctactgtggtaccactgcatgcatgaattgttatgtagtacttctatatatggacaaggtagcatgcagcagtacaaaatgttccaaatttaaaagcaactaattaaactagtgcttagtaacaaattaagccctatagctatagctagctagctagaccacctgatcacctaggtacgtgtatgcctagtacgtagctcttagccatgcatatgcatactctctccctttaaaaaaactcaatctagaagagatagttcatattcattatactaggaggagccaaatctatttttagattaagttttttttaggacggaggagttatatcgatagagtgtgttctctgatcgatcagatgagcagatcgacgtacgcgtgtatagtgtaggtgtacgttcatgcatatatataggactaatatctgcctcggaccgtacgtgcatgattcatggatcgatcttaatctccatgtgtccaaagcaagtctcaaattaatatagttccaatgcagggtttactcgtttgtcaatgcacgcgttgatgatcaagtgggagatcgatcgatcgaaggagatgagctagtacgtaccctgcctgcgtcagggcacaagcctcattcatatatatgcatgtggtttacacttgattggacaaaccaaagtggatactgaagctatgccacttgtgcccagggtacttaccaacacagatagcttaacacttgcaggccaagtttgttaattaataatccatgtcccataataattgtatttataggatttgaatttatctcaaaataattgtcaaaatatagtactaattaatgatctcattaatcacttctcattcaaatttctccttattttactctcaactatcctgtacactcttacgtagtaccatttaataaggggcattatactctttcttctcaaatcttcgtatatgcgaaacaaactagaattataatcttaattagcaattgaatcgaacagaagcacacaaacatgcatgcatgcatcgatcgatcggtcccatatatatatcgcgcatcaggatcgggtagctaccaattgtatgtgtaaatgtgtgcgcgcgccttcccatatcgggaaacgatgctccatcgatctgcattttattgatgtgctccagcaaggcgagtcgtagttgggtaaattctaaaattaacgccagagtttgccacaagtaatttggccgtgtttgatcatgttaggatagtgtttgcttcatagacatatatatgccagtcatgcaaaacttcatttaaaggagacctgaaatacatgatgtaggaacactaattaattagatgtggcaatgttatagcttctgtttgagagagcttctaccagctacagctttttccacagaatctctaattaagcttctcaaacatttcagattctcaaccaaattctgatatagaatatagataataaattgcatttgaagtcaaaagctagaaacctatcttttgtctattctcactagttgattagtactagaaagcttctgcgctcagaaaatgtggcatcgatagtcactcggcctgccccttctgtgcttaggatctgaagacggcgaaccacatcctcctcaattgtgtgtttgctcggcaggtctggctccgcgtgcttttgcctcttggctgggctgccctctctcccccgtggcagctggttctaggactggtggccgagcaccagggcccgctttacctgagcatctcctcgccggcttcgactccctggtgcttttggtttcttggcagttgtggaaggaacagaacgctagggttttcgactctgcgctctcttctgtctcagtggttctggagtccatccactcggagggtcgtctgtggtctttggctggcattgccgcctttggggatttgttgggagtgtagcgtggctctgccccctcccgctgtttggagtcttgtttttagccgccgtagtttttctaagttttcagctttgattttgcctttttttccccttcgcctggcataagccggtctggctgagtgaagttgtgtagctattacttttttcttctaatatattgacgtgtaatcgttttacacgttcgagaaaaaaaaactagaaagctgcttctcggaatctcgagcttctcaaacaaagtcattgcctacaaacacaaacaagctaagttgtggcatcaaatttgatggccacaactttaacaattgggacacaaatgtttagatgttcttggtctatcaaacaaataacctctggtaataattcgcagccacatacatactggcaatcacgcttaatttggggtagaaacagaactagctagttagagatatactatccattctggaggggaacaaagtacatgtgccatgcagaaagtgagggagcttagcacaagaactatgcagaattaatccaaaataatagtaccaatatccttttgtggtcctgctaacccattggtgatggtgactaattaagtaccaattaagtagagtctaggtgtcaattaagtaaagcagccaagttacatgacaactgacaattgtcacaagggccaaggccatccccaaattctttttgccatggacaccagcaaaggacgtagtactagcttgaagggtcatcaagttcatccttggacttagccaattctttcctcttctcatgcacctgcgcgccgtttcatcttttccttgtttgattagacgttttcaaaaggattaataggggtccagttctagggaggagattatattacttgttgatttgatataacccctatttgcatgcacacaccacctgtactgtacacgtcttgaggttggggttgagagcttaggtacactcatatcaatgttttgacttgatgtgagtgtcgaattatataattactccagtaagcaaaattgtagtactccatatatatcttagtaccttcggtaggatttctgatttctaccaccacatttaattagtttcactgaaagtacattgctttcctactagttaatccggaaattaattttgttgtttttattaattagtgtgaatcatgactcgatgtgatcgtaacatacatgtggtgagtctcaaattttctgaagacgggataaaatgcgcaaagatgagtattatcagggtgtgtttagttcacgttaaaattggaagtttgattggaattgaaacgatgtgacggaaaaattagaagtttgtatgtgtgtaggaaaattttgatgtgatggaaaagttggaggtttgaagaaaaagttggaaactaaaccaggcctcagatgccaatttctaagcgggaatgctagggggcagttgcctgatcgcctacttccacaccatcctgccttctgactgcatccccgtccatccatctatccattgtgcaagatcaaatctggcgagatggtcagtggtggtgtggatgaagcgtatgtgacgaggatagagccaccaaggagcagctcatcacccccttggtctttcacattgttgggtgagcactcacttcgatctcccttttcatctctatcgtcttcttcgatggggaaagaaggaggaagtgacgaatggggaagtaggggagatgagatggtggcattggcgagcgtgatggaaggaagtcttatgctactcctctttgatgtgagctcgtcactaccacggttatcctctcatgaaatcgaataatcatactcaaccaaatgcatcaacattggtgaactgattggtagttataggtattaggcacgtaccactagtatcaggcctgatacaccacaagtatctagtatcaggccatgatacaccacaaatatctagtatcatgcctgatacacaagtatgaaggacgtcttatactgacgggtatcaattgatacctatgggtatcggtctggtaccgatggggtaccagatcgacagatctgatatctacatagtattatcatatttgaacgggatcgcgtatattatcatggttaattgagcaatccagatcccaacttgctagtagataatgagaacagatctagaagcataggccatccatctttttccttacaagttagctagctagctagcaatccttcattctaaagttttgccctccacagtcagccctcttgttcaagtaacacatgagagctaaacaatggtgcaaaaccctaacactggtcctccctttccacattagggctccccatatatcctgcctccacaattcccatcagatcaaagctactagctaatagccactgcacatgccatgctacccaaatcatcacctcccttgtacctttattatattattcctagctaatctccacttaattacagtagtgttcaatctcatataagcatatgcatctcctagctaccaagctctctcttcctctgatcaactccactataattagctatagcttagctagctgagtgatcagtgagcaggtcgatagcttaattagcttccaattaatttgattaagagcttaagatggtaggcaagccacatcaccatggctcctcctcgcttgtggcggaggagctcaacctcttgcacggcggcggcgatggcggccgcggcggcggcgggctggggcagtggaagtgccggctgctgggctcgctggccggcctcggccggccgcggcgggcgcggtgcgtcgtgtgcctccaggtgcagcacgtcaccggcctccccccggcggcggaagggcgcggcgtggtggtggggtggcgcagcaggggcggcgagggggagcacacgtcgccggtgcgcgcgtcgcgcggcgccgccgcgttcgacgaggtgttcctcaactatttcgtcgccggcggcgccacgctgcggagcttcgccgtgtgggcggcgctcgtggacgacctggcgtcgacggcgaggggcggcggcgacctcggctccttccccgtcgacctcaccgagatcgccaccgcggagagctccaacccgcggttcggcggcaaggccctcagcttcccgctcggcggcgcggccgccggcgccgtgctcaccgtcagcgtctactgcagagtgatggagcgtgaggaaaaccatggcggcgccaatggtaataaggaagaaacgaaaccctagctagcctagttaatcacttaattatggcgctaaataacagtgtagtggttaattaattgcgaattaagaagtaaatactaattaattactacgtgtatcgatcacgaacaggccatgcaagagcggagaggaagaacaaggggaagggatcctacgcgtcgtgcctgccggatctgagctgcctccggaaccggccgtctccggcggcggcggcggcgtcggggtcggctcggcgggcggcgtcgctccgatccgatcgaggcgggttcatcacgatcgagaactcggtggcggagatggagggcggcggcgcgttcgggcgcgtggaggacgtggacgaggagggcgcggggttcatcacgatggagaagggcaccatctcgtcttcgcggtcgcggtctcgccggccggcgggcgaggacgacgaggccggcgacatggaggacgagaagccgtgcctgctgatggagctggcgccggaggaggcggcggcggcgttcgaggtggagaaggtggaggaggagttcctggcgatgctggaggacaagtactgggcgaggagcaaggagatcgagaaggggttgggcgtgagcctggacatggggctcgatctggggctggacctcgactcgctcatcaaggacgcggagatggagctcgccaaggcggagcaggcgtggcggagcaaggtcggcgccgccatcgtcgaggaggaggagtacatggacctcgtccgccgctggagcgcccgcgacgccgccgccgcgtgctggccggccgccgccttcgccttcgggagccccatctaggctatcttaatttgttctgctcgatcgatcatcaccatggcctatggcatgtgctactgcttcactcgtgtaacatcatcagtgatttatgtctgttataagtgttaattaattgttgcaatatcatactccctccattttttaatagatgacgccattgactttttctcacatgtttgaccattcgtcttattcaaaaaatttacgtaattataatttattttgctatgagttgttttatcactcatagtactttaagtgtgatttatatcttatacattcgcataaaatttttgaataagacaaatggtcaaacatgtgagaaaaagtcaacgacgttatctattaaaaaacggaggtagtatcattgaagagacaaacaaattaatttgaaggattcatgaaactcctggatctcttgttagtaggttgtttgccataaaaaagggattcgctagaaaacttctgcaaacttttggctccaaaactttcagatttgtgaacatcggattgccttgagatttatccatgaaggaaaaaaaatactagaaagaaattttcacacatgtcacgtgtgagatctcaatgctaactaaccaaacgatagttgaatgcaagttttatataagttatatcgtagttacagtatagttaatgcagttacaatgtagttacaaacttacaatctaattacactttaattatactatagttacatctgaaagttttttaatcaaaaaaaattacgacagccatacacgtctctttaagggatgtttggtagagctctaaatctaacatttatctagagtcatggaatcagggaaggatagtcatactcgtatgtattctctgaagtatattcgcctgcacctctcataaaagattaaagttctagtagcgtttggtttggctctagctctacaagacgagaatccaagagctgagcctatctaccgtttgtgatcacttgtttagatcatcacaaacagtgtccctactacgttcctaatcctgatattttaggattttagttgaaaaaaatgctacgacaattctattttctttccctaacaatcggcattcccttcttcattctcgctctccacaagttaaaaatcattctcgctctcaattttcgtctcttgagcaagactgccgcatgacaaaagggacgagcgggagagtggccgtaaatgtatgatagcaagaccggatggcatgatctgataaggcctgggtggagaggcccacctttttatttttggaagttaattagtaaagggagatcgagaaagatggtggagaaggtggatggtggtgattggcaaagtggtgagagtgttgttcgagttgtaagaagatggcgagtgacaaagagatgcattgactggagagaagttagcaacttactatcttcgttaaaaaaatataaggaattatagctagaatcaatctcttatactccctccttccctaaatgtttgatgccgttgacttttttaaacaagtttgaccgttcgtcttattcaaaaacttttatgaaatatgtaaaactatatgtatgtataaaagtatatttaacaatgaatcaaatgataggaaaagaattaataattacttaaattttttgaataagatgaacggtcaaacatgtttaaaaaagtcaacggcgtcaaacattttgggatggagggagtattttgaaacaattttagaacagaggtagtagtttggatggcggcaagtaaaatactccaatgaaatgattgcgtgaaagatgaaattagtttaatacaaaggagatggtgcataaatttgttttatatggatagatttaaaaaaaaagaaggtatgcaagacaatggcgtcatggcgatgaaagatgtggggtggacatagcgaggatttatatgaagggagggagccaatttgatacttccaaaattttgaatgcttttcatgctaaataaacaggtcgataactgttcccttccacgactgcttgcttaacggtttcatgtccaatatctagctctcatactccctctgtcccatgaaaaataaatctagaatcggatgtgacatattctattaatttatatccattaatattcagtattagattagttttttttatagaacggaaggagtatatacttgtactgattacgatgtacgcatgcaagttggataggcgacagcacagtgagtgagccggcgtcaatcatgcataagagtcagtgtgcgtcagacatgcatgacacttgtattaaccacagaccgtaacagaagcgagtgatctacagtcgcctgtggatttgctgctttgatttggacaaaagcaaagtggatgcttcatggacgtacatccaaatttggccgccctggaggaatgtctcagataattgagcagatgagcatagatacatggggatccacgaacatggcaggtccccacaggccacatcgccaggacctgatttcatgctccttcatcagcagtaaattacttaagtacatcacaaatttcaaccaagcgagcctctcgagtccgcaggttccaacgtatatagcacatcaaaatcaaatcaaaccaaacaggatgacgagcaattatcatctgagcaaaagtgaaagcattcgggtgaattccacgtgtggttattttacacagaataccgcgaaacacttgggatgagatgtcgaatttatgtaattgcctagctaggattttacaggtattacacaatattaattcaagaccgagttactccccaaaaaaatgaagccaacttatagagatcccaatagcctctatgctaaagagccagctaaagaaatggtttgtgtacaggtacaacaaaaaacaagcattctcctccctagccctggatctttaaaacctgcagggctcgttgccattgtttccatgcatcaatataagttcattggatgtgattgatcagaaaccttccctggagctattttttaatgtcgatgtggttttctgcatcccataccacaatcttaccatccaatcctgcaataacggagtacagaatgttaacatagactgcctgaacataaagctggagaatttaggccgtcaacatagaaatgttttaaacctgacgtgctgaaccgtttgacaatactgtcgtttccttttctcaatggcacgatgcaactgtgaaatttacgaaattattagtctatatgcaactgataagagtccgcttttgaactgcaaaatggaagtagagggtagtacgttatgcaattctcatgaacaccaccacgaggctttgatggttcaacagtatcactgcttgccacttgctttgattggccatatagctttccgaaggcttcagatagctgatacataaattttattctgatgttagttcttgtggaatcgcaagttattcaaataaccatggaccacctgttctgattattgtattcacaactgaaggcaaagatcaataggatacttgtgttaatgctactgcctcagctaaaaagaactgagcagatactctatatagacttgaggttgcactgataataaagggtgaatagttcaggtttaaaatgctgaagacaagaatgtttttcttttccaaccaaggataattccatttcaattactgaaaccagagatgtaaatatctttttgtaaactgaaaatccacttttttttatataaccaatagactgtacttccaaccatgggctgcgctatatagtgttcgcctaaatacacatgacgatagaaccttgtgaacatagtaaatagtagatagcagctgcatataacagcacaacagcaaggaatgacacgatgaaatcctgcactaacatgaagtaatgagagggagggagaaaggaaacctgtgaagctcttgaagttgatgtagttacttttctttcatccaagtatctgacaaagctcctatgagagacaaacatatatattaacctaaaataatggtcatggaactcttaggaaacaagatgttttttaagaaaaaaaggttaaagtgccttaactattaaggtgaagctaggcagctagaaatcagatgtttttaacaggaagaagcaagtgctcataacaatgcattgtcggaataaaaaggaaaatgcaaccactttaacaagttgctaatttgctatctacatctttgcttaccaaagtccagtctcatctgcagaaaagatcataggattgcaatcaaatccaacaccaatcaccgtcctttcagaaagaaaaagaatctgaaattttgtggagttcacccaatattatgaaacatggaattatagcatgcaaataaatactagcagaagggaaaatgctgacccacatcacggagaggcagatcacgcagtgctaaattctgtgcagcaggagacgtttcaacatcatcaatgaaataaatcatggaattgtgccctagcaatcagacaataacaaacaagtcaatatatgtaaataattgaaaattatcttatctgtggatatatcagagggtatagtgtcccatctgtgggaaataaaaattgaagaaacaagtcataatctcaacggagctcaaaatactggagatgacaaaagatgaactacgcagaggccttggctagtgtttttattaattgaagttcaactagattatgtcagtcaaggtgccacagtatatcgacaatgaagagaacctttcacatgtaaaagtataagttggtaggaggctatgatgcatgcgagatgatgtggtaaacaaaagcaaaatagagagttaaacacacacttaggatgaagaaacaagtaggagggagaacctgcataggctagtgtctttccacttggcgaccaccttacaccaaatgcccacatagatgataggtcaagctgagcaatttgctgcaaccacatagcagaaaaaatgttacaaggatgatcagcactttgacaggaaacaaaaaatgctatagcagctaatataaggatagtatgccttgccaagggttgtgaatcataatgagttctcaagttcttagttaatggagtatttaataaaaaaaacactgatgctgatgctaaaatgtataattagcctaagaagttgtgtggtgacaaaatggagaggcatatttgaaaatcgcaaagggatatatcgtaagacattttcattccaacagaaggaacagtggaacactatgcattaatggtctaagaaatggcaaatacctctccaaatttccaatcagtagaagtgctcgcatgtgatcccctggtcaagaaaaagctatgagataaacaaaatatttagaagatcctgataggcataagaacagcaaggtccaccttgtatcgacacccttgatgaaagtggataacactctgcatttaccatcagttgatgttgttgcaagaagtatctgaagaaacgcgaaagcaagcaaaataaaatattgcctccaaagaaaaacaggtcccgcatatacatagatgttgcgtgtataaaccaagcagaattgcatagtggtgggattgggagatatgcatctcacaagtacaagaaaaaaaagcaaaacgaaagaaaaacacagctgtaatgaaagcacaatataaagagagacgcttacattgtttggatgccatgcaacactagtgacagaagattcatgcttcttcctaacaaccttgctaatccacctataggtgaaggatccaggcagttaagaaaaatacatatcaagagtggcacatcaacctacctacttgcatgaactatatcagtagaaaacatacaacccagttgtaatgtttgacgtagctaatgtaaaactaaggaaatccaaaagtagcagtcaactaatacaggtagcagacacaattaccagttgttgtcttgttcatagtagcaaatgcacacagacttagcaccacttcctacggcaaacttgttttctgcaaacaatataaaatgaacttcaaaaacttgttttcttcatgatactgcacttcaggttataagcatccgtttttcacacattttgttgccaacaaatatggcagcacggttgagacaatctgacaaactaatgcatctgaacatctcatctaaagcataattagggctaaggaacttacaagttatgacttgtgcagttgtaattattcatgagtagtgtagtggcagtttttaagtaagggtaaggaaagaagagagggaaagtgcttagaggttctaagatgactaatatttgggaaagagtttattaggcttgcacgatttatatttgtatctgagagagtaaagaactataaagcatatacactggttataaagagaatatattgattcagcaacgggagtagaaaaatccaatgcgccagtaagcatcaaggcaggttataaagagaaccttttgggctccactggacacataaagctgcacgatttagcttgagaataacaagggtaggaacccaatcatggccctcttgtgtccaaacatatctgcagttcatataaggaaaaaaggagaccaacatgtatttatacccttgtggaataggaaggtgattcataataagaaaattgagacttgatgtgtacttacgaatttctatcatgtgagaccgttacgatcttgttggaagatctactccaatctattccagatactatttgatcatgctgcaagatatagcaatagcgaaaataataagataatgaatcaactatcgattatacagtactgcattgtaaaaagatgatgagagagagagagagagaggtgctcaagatcatcgcacttgtaaaatataaataagaacatttacctttgaaagaacatgaagtttctcccacttgtcagtaaaaaacttatagatatgtacttcattgttgtttggacaaaaggcaatcactgaaagagagaaaaggttacatgtcaagttaaaaataagatggcatgggatgtgcatcataaaaaggggaaatggcatcattctagagggatgtaacagtgtctcatattacaaggcaagaaatgctgtattcttaaattacagtaggtgttttgccatataagcagataatatatcatctatggtcagtatgaacagaaatctaatgtattgctcacccctccaatgggactagcacacatcaagcgagcacgaaagagtatagccctctgttcaagtctacattatgcagagttcagtagtttcatctatccctctatcagcagcagacaagcaacctgggcttacactagaggagaactgaagaacattatatataattgcaggaagcctacttcattttccataacaatcatgtgggtgccatgtataatgtactggttgttaccatggatgagagcattcatttaccagtgcatgacagaacaagagctagcgctatgtagcaagaaattcccattcagatatggtgcagggaatggagtggcaggtaaaattcacaggaaacatggaattattcaggtcataattcaaagaaccaagtcagtaaatttcaaattacatatagcgccccacctacgaggggaaatccatgatgtaaacttgtgttacggacgcgatccatgtctcctagtatcaccctaataccgaaaccaccttagcaaggcatttgttctacagaaacccatacatcagcaggaaacgccaccgctggcaccaaaaccagcaacaccacggatcgaagatagagagggacatccctcatctccacgaaatgagcagcaacgacaaccgattcctaccggggggattcgaaacggagctcaatcacatttgcaggcggaaaccctagaaaaacgtggtcgcgaatcccacccgtaccgaccgcacgcactcgtagccagcgtcgtacgccatggccggcgatccagaatcgaatcaaacgggaacaccgcggagggcgcgagatctagagaagagaggggggaaggagaggaggagcaggaggaggggtgattactcgagtggtcggggctccacgcgtggcaggtgatgcactcggcgaactggtggatcgccgccgcggccatcgcgggcggcggcggaggggagcggcgcggcgcggctgtggcggaggcggaggtggagggtggtgatggtggtggaaatggttggaacttggaggcgaagcgaaatacactactactagtgcaccactcgtccgcactacggacggggccgttaggcacgcccactaccgcggcccacatcttcgccactacaactagtactttttttttccttcagttatgtatatataaaaaatgtacatttttcatcaaattttgaatgagcaaaatatattcttgccattgttaccctgtaaaatttggtaattgaagaggtttctctactttaagattctgccaaaatatgatagttaagactttaaactaggggtctatttggttctctaccctaccaattcaatggtaaattttggcactaccgtagagtaaagttcatataatatatgtgtttgtttgctatcatttgctattaatatgcttttatagtgaagaaaagttatagagtagtaccaaattagatatgggcattgccaatgctttgactctaatccaaaccaatcaaactattatttaaattgctaaacaattggtagggcatattttagcatcaatccaaaatggccccaaatgcaaccaacgctaccaaaatttagtaacatcaaactacatggaaattgagtattattgatttgttgtaaggttaataataataataaattgaacaagcacttaaaaatcattgttttggattactttaataaatatacgtcatgtttttattttttcttttggtgaaagggaaggaatgagaataagaatctcatcatttcgtatggtgatctccgccaatcaatgtgctcgagaatatgttggctgcagtcattttctactgcacactgattatagtagccccttcctgcgttaatgatcatcacgtctatcattattccccgcacgctgttgtaccaaccaaagatggccagagaaaaaggaaaggcagaagaaaaaagggagaagaagatgtgagacaaattaagattggcccgtttggggcccatctatgaggcccacgcccttcaaagcctggtccaactcaactcaatgccctcgcaaacactgttcctttcaactttcaactttcaagcgtgaagtgcttttatttattttttttagataatgaaatataatatcccggcatttactcaaaagagctacagccaattattacatagtagttttcatgaacatagtgtaaatctaaatgaatagaaacataccgaagatcactattattgaaaccagcctaatgtaaggagatcacaattattgaagtctatttgtaaatctccaaccataattggcaaatagttgcataaccgtggtctccaactttcggcatgcaactttcagaaactcttcatcttcatcacacctttgtagttgtgcccaaaaccggagccaatgagttgccctgaaaataacctgcatataggaaaatgatggtgatttgtcaaaaaccatatcgttcctactcagccatattgcccaacaaatggcagaagctccaacaagtatcagtttactcattttcttatcaactcccaaaagccacccattaaaaatatgagatatgctaactggaagattaaaaccaaaagagaactgaactgctctccatagaaatttcgcaaaatgacaatccataaagagatgttgaatagactcattcttcaaacaaaaagaacacctcaagctgccattccagttacgccttgccaaattatccttagttaacacaacccctttaagcaggtaccacatgaaaattttaatcttaagtggcaacttaagcttccaaatacacttgtttctctcgatatagccattattaattaaagctaggtacatagacctcaccgagaacaagccattctgatggaaattccatctaaaactatcagacaaatcattcaactgaatatgtactatagaggtacacaactgatgccaacaaacaagattctgaccaattaaagctctcctgaaagaaacattaagcggaacatatcccataacagtggcaatagaagatgttttcctccgaacaattgcgtacaaagatggatatttatccttaaaagccaagttaccaatccatctatcttcccaaaatctgatttgttccccattattgacaatccaagaacccatatttaagaaagtacttttgacattcataagaccagaccaaaaatgggaatcaccttgtttcctgtcaacttgggttatagatttattataaagatatttcctcttcaataaatcatgccaaaccccatcctcattaattaacttaaacaaccatttacttaaaagatatttattttgtatctccaaattatgaatcccaagacccccctggtccttgggttgacaaacaacatcccacctagtgagcctgtattttttcttatggtcatccccttgccaaaaaaaccgcgatctataataatcaattttacgaagaacccctttcggcacctaaaaaaagatatcataaatagggctaaacttgaaagaacagaattaatcaacaccagtctaccaccaacagataaatgcttgtctttccaactactaagctttttctcaattctctcttcaataagtttccaatctttattagaaagcttcctaaaatgcatcggaattccaaggtatttaaaaggaaaggtacctaacttacaaccaaaaatatcagaatagtgttcataacattcctttgcctgaccaaagcaaaataattcactcttgtgaaaatttatttttaggctagataacttttcaaataccgataaaatcagtttcaaattctttgcctgttgcaagtcatgctccaaaaagataatagtatcatctgcgtattgcaagatagacacaccatcatcaacaagatgaggaataaccccattcaagagtcccgcctctttagccctcttaatcaatagagtaagcatgtcagctactatattaaaaagaataggggataaaggatccccttgcctaagtcctttgtaagtttgaaaacaattaccaatttgatcgttaacttttataccaacatgaccaccttgaacaaaagaagctatccattcacaccatctaggagaaaagcctttcattctcaaagtttgttgtacaaaaggccatttaactttatcataagctttctcaaaatcaatcttaaaaattacaccacttttatctttgcgatgtaattcatgtaaagtctcatgtaaaataaccaccccttccataatatttctcccaggaataaacgcagtttgagtaggactaattaccttttgagcgacatccattattctatttgtagcaactttggtaaaaatcttaaagctaacattaagtaggcatataggtctatactgttgaatctttaaagcctcagcatacttaggcaaaagaatgatagttccaaagttaagcgaatataaaggcaaactcccagaatgaaagtccttaaataactctaaaaggtcaaatttaatgacattccagaaaacttggtaaaactcagcaggaaatccatctgggcccggagctttgttatgttccatttggaaaatagcatccttaacctcattttcagaaaattccttagttaaggcttcattctctaaatatgaaacttgaggaatgtcagcaacataattctcatcaaactgaaggttatactcatcaggagggccaaaaagacctttataataagtggtaatatgcgactttaaattggcatcaccacttattaaatgatcactctcctgtaattgataaattctagttttcctatgttttccatttgccactaaatgaaaatactttgtattagagtcaccctctaaaatatccttagtcttagcccgctgataccatttaatttcttcttctcttagaatgacagataacctactcctgaaaaaccatctaatatcaacttcctcttgagacaggagaacagtctctgcctttttatccagcgcctccaacttatctaaaatatgctttttctcttttttgtataaaccactggtatgtttagcccatcccctaagatgctgtcttaggcggcgaattttcgcttgccaacgctccataggagtattgacctcatcaaccccagaccaaacttcttttaccatatcaacaaatccatcacgtaacaaccaaccaagttcaaacttaaaactatgttgagcgttactaaaagaggaagattttgtatttaggagcaaaggagtatggtctgaaatatctctattgagagcaacaaaagaggataaagggtatttttgctcccattccgttgacactaaaactctatccagtttctcataggttgggtgtgccagattatttgtccaagtaaaattcctaccagtcattcgtatctccctaaggcacaacccatcaataatagcattaaataagaagggccatctatcatcataattatcattatttattaattattattattattattattattattattattattattcaactttgagacaatagccgtcacgtgcagagtggcatggcatctccaggcacaagagaacatcgcatgacgcatcggcatcacatgcatgagcacatgacgtgtggtgtcacagaatctttgggttctcctgaaaataaaaataaaaagctcaatatttcgaaagctactctctgcatcataaatatgttttctttcttccaaaatataataagttttagttagataagacatatcatagtattacgaatctggacataataataggatgtgtattatccaaccatatccaaatttttagaactacgaatctaaacatcgtactaggatgtgttttatctaattatatccagattcatagtgttataaatttaggatgtgtcttatccaatcaatttttttttatattttgaaacgaagaagtaacaactatctactatatagattaatcatagaacaatttgtacgctggtgtccagtccgacgagatgagcatgagctttctgtacgtggcagaaaaaaatccatggctggctgacattgcaccgtgccggacggtggcggcggccgcgtcgccttctcccttcctggcgctgtcagcttgtggggtcgggatgtcatccagcgtagcggaatctactcgcccgcccgcggatcgctctcgcgctgccgaatctcaaaaggtgggagcgaaacctttttcttctgtcaccccagcttttccttacccccacacagccagcgcacctacggtacccgtatggcccacctgtcatacaccacctgacatatccccctcggcttcccaccgcctgcaatcgggccccaccacgctccgtccaatcccagtgacaggtgggccccggacagatcggtccacctgtccgtgacacgtgctcaacacgtgcgactcgcaggtagtagtagagctgaaaatacgcaacgcatccgcgcgacacctagcccttctcgatctctctctcgctgcagatccaaaccaacctcaccgtcgacgaggaagaaggcggcggcggcggcggaggcgaaggcggcgaagatgcagtacaagaacctggggaggtcggggctgcgggtgagccagctgtcgtacggggcgtgggtgacgttcggcaaccagctggacgtgaaggaggcgaaggcgctgctccaggcgtgccgcgacgccggcgtgaacttcttcgacaacgccgaggtgtacgcgaacgggcgcgccgaggagatcatggggcaggcgatgcgggacctcgggtggcgccgctccgacgtcgtcgtctccaccaagctcttctggggagggcagggccccaacgacaagggcctctcccggaagcacatcgtcgagggcctccgcggctcgctcaagcgcctcgacatggactacgtcgacgtcgtctactgccaccgccccgacgccaccacccccgtcgaggagaccgtgcgcgccatgaactgggtcatcgaccacggcatggccttctactggggcacctccgagtggtccgcccagcagatcaccgaggcgtggagcgtcgccaaccgcctcgacctcgtcggacccatcgtcgaacagcctgagtacaacctcttctcgcgccacaaggtcactgatcccttatccctatccttccttccttccccccaactggatctcatcttccaaaacccatagcaatttcaatttggttgggcgatacgcgcggattgaatttgaattgatggcggttcacggatttcatgtgtaccaattgatgagcacttgccgatgtttccaccgcccagaacgagagctcgtttaaaatcgaaagcgaatatgtttaatgctggtattctagtactccaactgctgatgcgtagtactgtacgtaggtttggtgagttgggattaggatcagatccttctctttttcacatttattattgtctctttgatgagctcctagatcctgtagacactagtaccgttagtattccacctgcacggatgagtaagtagtataccaattacatgagaattttggctacacatgatagagcatcggttcgattcgcgatggtgacatctccgcattttcacctaaactttgaaaattaagcacaggtgagcagtcagggaggatgagtagtatagatctcatcctcctcgatgtgacctgtagcactacatggctccagcgatagtatttttctttagcttcagaactggagtagtaggcagtaatgtcggccatgcattgctttacattctcttgtgtcattacgccaggcaaaagacagagcaatgctgataatgaaagctcaagtataacaatattgtggagattacttagacaacaatgctcctttcatacttacaattggaagctttatttgatatttagtctttatcaggttgacaccttgatattcggtcataatcaaatgagatggcttacgtaaatatgtgagatctcaaaaagtttcagtttgggctcccaaaaatttttctatttggcagcttcagcacgcttaaaacagaaaagacagcatgagcttaagtagtcaaggtggagctttctatgactggtagaggaaaaacagaaatggttgtcattctctatgactagtgctacgaataaattagtccagagatttctcttgttgtctactgggaggatgatacaacctagcaggaaatgtacttagttatttatttttgctatgcacaatgcagatttctttttgccgggtcggctgaaaatcgaccaaccgaattgtattaagaagagagagaaatgaaccaggtacagaacgacattgtactgtcgcagggcataagcccccccaaaaaaaagaaaaagctcctagggatcaaggaacccaggagaagactcccacacactactctctatgcttaaacactccagcttccctccaaatcagcacttcatctctaatggctctgtaaacttgcgctgaagtgcaatctttgtgttcaaagattctcgagttgcgctctttccataacatccaacaaaccaacatacatagagtgtcaaaggccggcctgtagctcggctgaaaaagttgccgcacttgtcgtcaccattccatgaagtgttccccttcatcccccggcaaggaaaaggagactccgagccagctccttaacattcttcacactctgtttgtgaattgacagtccactaacaagtgacaatgcagatttctttatgcgatgctttccagaatcttgctgtaagatatttcagaatccagtaagtctaaaggagaacaatgttgaacttgaagaatttgagttgctagttcagtatagccaatgcaatgaattggacttggctacgagtcatgactgatccatctatcagcagatccattgctgatacagaactttttgatataaccataaaaggcatgtacactgtactgttctgtgctgacaaacttctgccattcaactgagtgtgtaggatcactgctttttctcaccaatgcattgtagcaagtccttttgaagattaagatggcaaaaagtttattgctgtgtgtaattgtgtaacaagaagtaacgatcttgtacttctgcaggtggaatctgagttcttacctctttacagcacgtatggcctgggtttgactacatggagccctctagcttcgggagttctcactggaaagtatgccaaaggaaatatacctgctgatagtaggtttgccctagaaaattacaaggtaatattggtaactttgtccctgtactagatacgtgcattcctgcttttctttttctgaattctgatattaaaatgttcatgcttattctcagctgccttgtgccatcattttttctatcgacaatactacgctgtaactatgctttttaaagtatcatgctacctgagtacctgactattaattactccctccatctacttttgatagtcatatttccaaatctgaaaattttatttttgataggcatatttcaatccaacaacctatcatcttaacgactttcttggatttaatgtgtgactctccattcttccacacaagattggctacatgagcatcgagaaatgtaaatattaatgaatcgtttgtttacgaggaatgactagtagcatgtttaaatagatgataagtagaattacttatccttggtctgtgtatcaagatgaaatatgactatcaaaagtagatggagggagtacctttgtccatgcatgaagatcacaatgtcatgttaagataccaaggataaaactcaactattactactatatcaattgcattaatcattggattgtagttcatggtggattcaatgctgcatgatcagtgttccagaacatagcgtgtcattgttgtgacttaggccctgtttgattcagcttaggattattataatctggattattaggagtaagctgaaacaaacagatagcttattgtgatagcttattataatctataagccagattactataatctggtaatccactctaaaggtgcttttttagattattgggtggctaacagctaacaaacaactaataatccggagaaacaaacagctaatagcttattctatgtcggctttattataatccaacttatagtaatctggctcaataatctagattacaataatcttaagctgaaacaaacagggccttaataacttatgtagcagctgctagcatgacttctgcttgttctgaacgttgactaaacgcttgtgtacatcatggtttttcattttctgaatgggcttatgaaacttgcccctaacaaatacatcgatgctacttcagttttccttgtcagatgtgtttgtcttttttctctttcagaatctgagctgttctaaacaaggcaacttttttctctttcagaacctggccaacagatctctggttgacgacacactgagaaaggtgaatgggctaaaaccaattgcttctgagcttggtgtttcgttagcccaacttgctatcgcgtggtgcgcatcgaacccaaacgtctcatctgtgatcactggagccacaaaagaaaaccaggtacgttccacacgcccgcgtgcttcacaagatatgtttcttttgccaagtaagacgccaattaatggtttttctgaaactaagaatactaatccatcatttggtaactaaaaatgagcagattgttgaaaacatgaaggccctcgatgtcattccgctgctaaccccagaagtcgtcgacaagatcgaagcggtggtccaaagcaagccgaagcgcaccgagtcatacagatgaagcggtacagggggtgtgcagagtgtgctccagggatttcaggatttacccggtgggattcttttagacgatattattatcttccattgtcttatgtttggaagctgctttatgtgcctgggtttgtgtagttgggaaatggtgtccagtggtactctgctctatatacattttgtcatgtggaccactcacttgttgctgtcggtgatatatataccttggtcttttccgtgtgcatctatccatccattccctgcgtttcttgctggcatcttttctgattctttggtgtcttgtgcttggactgtccctgcatcctccttcctggtgaccttgttctcgtgccattgtctgcctgccagcatcaaagattcagccgagcgagtgagagtgccaaggaatcaggagtgtttttatcatggtccttgctgatttttctcgctggcaagatttcaatggcaggctggccaccatgtctcatggcatgctgtgctgaggaatcaatctgtttctgttcaccttggggaagatgatagtactaccactacattgtgtcattgtgtcagtcacatctcatctggtagtgagtgatgagtagtagttgtagcatgcgcatgtgctgttgcttgcaggaatcctctgcattcacaggtgctaaaattggaggcaaaaatgaagcaggggaggtggtctggttgctttgctgcttggccggcagaggcaacggaggctggcacgctttcgtgcggatccgggaacggatcaggaatccaggggggtcgctgttcagtgtggctggcaacacgaaaacagccaagacagcaaacaaagtgtgagctatcagcattcaagcaaagcacacacacaaacaagcctctttcactctacattttttctgtctccggatgatgctgaatagatgatgatgccacatggcccagtacagcaactgcgataaggtccttttctcttagcaacacaagacttttttttttcatcacacatattaggaattttggaggtggattaatcaatgaaactccagggctaattcatagagatttgtgaggctgtgcaagagtcagtagtaatcaggtaggcacaaggatcatcatcaaacaccataaaaactactagaaagacatacttgtacatgcaagcagagcaaggcgaccatatgctcttgcagatcgacagtgcaaacaaaaacaggcaccacaaaggcaaaaatataacagaaccgggtgagccctgtggctctttcttactagccttctgctattttaactggacaagtaattaaccatcaagcacgctccaagcttcaccagcggtatagctcttttccttgtcacacgctctcaggatctgcctcttgttgaagcaatggttctgtgaattccctggtatcgctgacctgcaacggattgtcggtaaaatgagcgcaaatcaggttagaacctaaacgggtgcgttttagctgattaaagtgctaaaatcctactagtggcaaaacaagctatttcaagttatcctctagattcagttcaacaggttatacatacaacaataatcgattccattcagacgactgactagcatcaaatgtaataggtggtagaaaagaatctaaccaagaccattcgcatctgatgtcctcatgatcctcaacctcttcacagagctgacaaacattctgcgcacaagaacaaggcaacaccgtaataataagtcacctgaatagctattcgaagtcgccttgaaaattagaactataaaaatttctagtgcccaggttctaatagctacatagtgcaacgacttactcccaaggaacatctccaacgagcatccagtcaccatccctgtcctcgtaggtgagctggtattcggcagagttgtctagtagtttcagcgagtttgtattatctgaaaatgcgaagataaccataattcaggttcatggacaagatgaatcaacctatcatgaaaaaagcttgcgacttactaggtacaatatgaagcatggctattattttaatttgcaaaactatctcattgtcctacactattattatgtattgtgcgcagcaaagcttgattccacttaacttgatgtgatttgaaaatatgtgaaactgtgagctacttaaagtgacagttcagactcgagcttacgagaagcgcaaaggccaatggacggcttcgtgaacatgagttcaagggctaatgcaagggtcttgtatgagcggtgcgcattgagatccaccttccttccaatgacctctccatccatgttcaccttcacccatccagcaacccgtcctttcttttcgccctcctccttgtccttctgcacatcagattcattggtggcggtcttcttggtgtcggtttcagatgtgttttctttagcctgattgaacaggctgttcatcctgaactgtcggatcggtggccatcccaccactccaaagctgctgccaaaccaggaaatgcagttgggattagttgaaatgtattgaaaagtctacatgtgtaggtgtagctcagcaactctggtgctgatatatatctggtcctcatttcagagaaaatcttactagcgccacaagtcaaacaaaagtgtttgtagttacatattagagtgcagatcaagcaccaaacttgtcattttttgtccttgaatttggaaggataagaagcttatgcacagcacaggtgtggagtgtagataataataggttttggaggttgttgctgatgtgagttctatgcacaactacaggagaagccatatgcaaatatcctatgatgctaaccagtgagcagaacaagtggcaaccaatcttgcagacaaatttattactgctactcttactacttcagagaatcataaaagaaactgtttttgtatcgagtaataaatatagtgctatatatgaaattatgaggcagagaagaagcaagaaccctgaaggtgttgtgttctgctctgctctgctcagctcacctgtgtggatggccggaagcaaccgtcccaggcgaggtggtggcggtggggccctcagccctcttcccccccgccgccgccgccgccgcgggggatgacgacgacacggaggagtccggtgacagcgccgccgccggctgcaggtccctggccgtcaggattcggcacggcgcatgctgctgctgctgctgtttcttggagccaaggctgagcccgagctccagctcctcgtcgtccccagctgagctctcctccacctcctccgcctccgcctccgtccccggcggctcgccggcggtgggcccagctactcctcctctcatcggcgccgctgcttgctgcttggcttgtgcgtgtgcgtgtgtggagtggagaagaggacacggacgaacacctgggcctcgagagggaggaaaggaggaggaggaaggctataattaagctgaggcagcagcattaagcggcagttgtgggtagtagtgcagcaaagggctacctgggccccacctgtcctcctggcatgtggggcccacaatgctggcctggggtttgggggttttgtagctgctagagagcacccaaccattttgtagcaagcacaattcacttgggtttttcttggtgttggggtggattgtggtaatgtataggagtgctgcattttatttgtttggtagtagtggtagtagatccgttttgcctttttttgtttttttttctaaattggcatatgcgaaagaagacgatattatgataggaattgcatgacggtgtttttctataaaaaaaatagtgatattatgtttgtgttttatattttcacgctaatcaaagaagatggagttggtagccaagaaaatatacatgggagaacttactgagtgatcaagatgtaagatgatagaaatcatagagttacgattcatctgtctagggtaatatggtccttcctaatactaacaaatcatatgtggacaataagctttggctttttacttggccgtgatgtttgatttgtgctcgctcctagtcgtgcatgcaatagtttttgcaacaaccaaattactactaatgttttgattgctccaatcttagagtgcttactcaatcaatggttacttagttctagctctactgacacggggttgtgcatcactttttatctctatctcatatatacctcttggcttttagattgcgcttcattgttcgcatgccatatccaatggagttgacaagtactaattaatttgcatcatgcaattataaatccatattcaagccgttcaggagccattaggctgtatgattgacgtgttcactttttctgatttgtgaataattcttggtacctattactttgaattttacaacaaaaatgtgtgtgtgtgtatatatatataggtaaattaactggtgctacatggaatatgggctccaagattcaaattgagtatatacccaatttgaatgagtatgaaattttttttaaatgtttagatatgaacattaacttctttactaacaagttcaaacaagtttgaactgagtttgaacttttttttttgctagattttggttctaggtatataacatccaaacatataattcgttaggtatgtaataatgaattgtgaaataaagttgagtttgagttgttttgttgttaggtatttgtatgaatcaaattcatatacctaggtatatactcacaatttattttttttaaaaaaaaattgagagaatttgtgtgttttataccttggagcccgggcaccatggagtcctatatgtgtatcatatatatatatatatatatatatatatatatatatatatatatgtatgtatgcatatgtatatatatgcttttattatccgtgtgggatggtttggaaactagtaacatatcagttatgttttttcacggtaactattacttactcctcacgtctaaatcatggatccgtaaccgatcacaattgtgcatattaactctaatctataggtttttctaagtttatacacttgcttaacagctggtgtggggacagaaaaagggggagacagagcaatttgcctctttgtgggatggttgccctttgggcagtgggccccggtatttgccttttgttggtgtacaaaatgcaagagacaagggaaagagaggagatgaaaacggagaaatgggaaggaggggaggggaaagggttggtcacgtgagtcctcacatgtcctttgcatcctttgcgatgatgcagcactgctctgcattctgtttagctacctacgatactaatagtacagtgtacacttgtacatgaacacagtacccaaagggctatgctcaaggttgtcagtatcctaattcgtatcctagtatcttacgatactacgatcctatcaagccgaaacgatactaatcccatctagtatcctaattttcatagtatctcgatcctactattcattactacacgttcctacgaaatcttaggtggtatcccgattctacgatccctacgatactacaaaatattatttaaaataatatggtttgaaaataatgtaactaaatatgctcaaatttatataaaaatcagttaaatatatcaaaaccaacgtggtttctcttgataaatgtctatatttgcatgatatatatcattactatatttttttatatagaatggctatatataattaatataaatattaattaaactttaaaaaataaaatcttatagtatcccgatactacgatatgatcctacgatacgatattacttcgagcaaaatgatactacctagtatcccgatgctgacaaccttggctatgcctgttcatggtctatagtggagtaaaaaattaatgtatcgaaactgatctgggtgaaatgtagttgtaacacttgaattaagctcttgcaaaccgtaccatagttaggttaatttacacttaaaaccttcccctttgtttgttttttttataaaatggaaagttcaattttttattgacgaggagatgaaattttcaataactagagaaacgaaattatgtgataaaagaaccaataaaataacatggtgataaaatagtactactaccgcttcctagctagagcaatgcatactcctgtatgtactctctctccgtaaaaaaaaacgaacatcatatttccagatttgtaatactaggatgtgatgtgtaacatctcatacgtggttggttttattttagtaccgatggagtactctggtagtgctcctatgtagcagtagtgatgtagtggtattcgatctggttgtgtgctggctagcaatgtcatttgttctaaggggtactccccgttcaaaaaaaaaaggtcaaattctagagatgaatctggatacgtgtgtctaaagactttttttttacggagggagtaggagcaaacctcggttattgtagcgttagagcacttacaataaattagtgtaaatgggttttacatgttaccatattatattttgcgcttatgtgaaagagaataaaagtgaactacagatttgtagtcagatgtaaaacgagctccaataaactatgtgagagggaaatgtgggggtatatattaacggtgcatgtatttattgttaactattgtatgatgagtatgcaattgagttaattatagataatgtgttaatttttgaagctagtagttatctatattaggccctatttagattccaattttttttcttcaaactttcaacttttccgtcacatcaaatttctctacatacataaacttccaacttttccgtcacatcatttcaatttcttcaaacttccaattttagtgtggaactaaacacatccttattaaacttgctcttacggacttaaaataccaacttagcacaatccgtttaaattcgtaatactaaaatataatcatttttggtttttttaagacagaggaaatactccgtagaatatacggagcaggagtcgcagctagggtgtagcagtagcagttcttttacagtagtactagggggtagcagtagtagccaggtttcccaaactgccggggccggggttaccgcgccccggcggtaagcacgtttaccgcacggtaaccacggtaactgtaaaagaccgtacgaaaccgtgcaaaatttattaaaaatttaaattattttttaaatttatttgaatttaaagaggttaccgcagtttttttattaccgtacccgcgctacggtaagtggaacctggtagtagtagtagtagggaaaggtagctgcacatgacatattgccgggcgggcaggccaaaacggtttggttgttgacctcgcatcgcagtggacaactctacagtacgttggatgggggtagacaagctcgtgtgcgcgtactagtatgcgataaagagatagaggtgggggggacaagccgacaaagaaggcgcgccaactgttgaccccgtgtgccccgctccgacacccctcgcttttccccctcccatcctctctctcctgtcgcctcctctctcctcatcacactagctatgccattgccacccccacttccactgctccactaccactgctataccatcgctccaatgtactacgggtgtgtttagttccacactaagattaaaagtttaaaaaaaaatttagaagtttatatgtgatggaaaagtttgaaggttgaagaaaaagttgagaactaaaccaggcctaccttcagttttaactttttctattatctaaaaaatagtttactccttccgtcctagaatatagcaacctaggatcggatgtgatgcatcatagtactacgaatctagacagggggctgttcagatttttagtactagagtacatcccatccggttctaggttgttacattctagaatggagggagtattttttaaataattattatattgaagttcgtaaaaatatattgagattagatagaataatcttctatcacactatccttcgtgatcgtcacagatactctcttctggttgataatacttatctttttgtcaagagtacggtctcaaaaaaacaattttgacaattattttctattataatattataatatgtataaaaatgttaacagatatatgattttattaaagtatttttttaagactaatctatatatgtagtcaccatatttaaaagacattttaaaaatgattcataatcaaatattttaaagtttgacctcacccttatctaaaaaaaggacaagtattatcagcccgaagaaaatataaatataatgatttctggttatacatctagacacacattcttatagtagtattaaggaacgaatatacagcatcatatatataccatcatagtgcaaataagatgtgagcagtattttggggccaaacagaattccgaactctttgggctaaggaatgggctaaacatctccgatctagcccacttcattatttcactagaacaatgttttgaccaataagaaatatgatttttgagacaaaattaatgtcattagatttacattcaaaagtaatgagtgctattagatttatattcacaaatgctttcctgtaattatacttctgtgtcacataaatataatatattaataaagcagttggtgattaaagcattgtcctaacaagcaaaataaattgttttatactgtattatttttttacagagaaagtagtactaagtattttggacaacgatcaggccaggccagatttgatttgggccaaattatccatgatcaggcctacccttatcaggcccttcaacatttgcaaccactgtgctcctctcagtgtttcgtgtggaacacttgacaaaacaaacattgagcatgcatgccccttattcgcataaattattattagtgcaaaatgttacatgaaaagatcttcaatatactgttacacctttcaccggagaagattacgtgtttcctgcatttagttttcggtatagatcttactgccagagtatgctccattggactgaccaccatgatgattttgcaccactgctttgctttgcatttctcttagaaaactgccgctaatggtggcgcacgtttgagaattggtcgaccgagtcaccccgctcaaacacagctgctgcccccatgccagatcctgcaaccaattcatgcatagttacatactagtacacaagatgtcatggaagtttaacaacgagggctacttgcatgcattctcctgcacacagagaaatccagagaaaaagaactcaccaatgcacatggtgacaacaccgaatctgcagtccctgccccggcgcttcatttcattcagaagagttgcgacgcaccgggcacctgaccaacagaggaacaatcaccccatttagaagacatgcttggatgatctgtagcaggtactaacagacagcaatgctacttccattgacacctgcacattctaaagccagaatgacgatctcccatacaagtatttgattacctgttgcaccaagaggatgtcctagggcgattgcgcctccattcacgtttacttttgacctgtccagtcccagcttgttgcagcaatacacgaactgcgaagcgaaggcctatacaagaatacagatggcatgggtatcaaccattgtagctaggtacgagtaaacgagtgagctaatattgtaaaaagtaacaaacctcattcaattcaaacagatcaatgtcttcaatctggagtccagcagacttcactgcagctggtattgctactgcaggaccaacacccataacagcaggatctactccaacagcagcaaagctcctaaatgatgattggaggcaacatatggatggatcagttaaaagaaaatgtgataatatattaggtcccaacagcaatagcaataacaatgatgatcacaaactccgttcacacctaacaataagatacactccctccattccataatataaggcacaaccacttttcttagatgttccataatataaggtatacatgcaaacatgcaattaactatgacatcttctccattaaattattacttttttaaatcctccactctcatgctatctaatcctattggatgcatgcattatatttattaggatgatccaaactacaagatgataataattatttcttggtctttgggttaagggtggttgtgccttatattttggaatagagggagtatctcatacagcattcaggaacacatgttaagactgaaccaaatgctgtatatacaaggaaatgcaaaatgcagcacctgaaaacaccaagaataggaagtcccttcttcatcgctacgtccctcctcatgagaagaacagctccagcaccatcgctcacttgactagagttgcctacatagattcgttaaattaaaaaaaaaaaacacatacacaatgtaacaagcaatggacaaacaaagcctggttgcaatagtagtgtcagcagaaaaaaaagctaagagtgctgcaatacctgcagttgtggtaccatccttccggaaaactggtttaagctttgccaatccagatgctgtggtccctggcctaattccatcatcaactgatatcacaactttcttttcctctccagtcttggggtcaacaatctgcacaggaaagaatatcagtgaaccttgcacaggtcctgattagcaaaagaaaaatccagtgacaacaaccattcatgagtcaacaataaccatgaacaataaactaggttacatcacatgaactaaatcccagagcctcttacctttgtaggcaccggaacaatctcatctttgaatttcccagcagctgtggctgcagcagccctcctatgagactcagcctgttaaaaacaaaaatttcgacagtgttttgagtaaaaggaagcagtgggaagaaaaaacacaaacagaatgtatgcaagtgactcacagcagcctgatcctgctcttgtcttgttacaccatatcggtgcgcaacattttcggacgttatccccatgggcaaaagacaatcctgtgctttctggacttcatttacctacaaagtacgtggtgttacaaggcatcaccagagaacaacagaaatacagaggatgctctggtgctcatagaattcatactttagggtttacttgtccttcccaacccatagcatttactgacatggattccaggcctgcaccaatccctgtttttgatggaaaaagacaaattagcacctttaaatgaagcaaccatgtagcagagttagcataaccatattgtctagaacgagtaactagttaattacctatgtcgtagaacccagctttaatggccgcggcaacatcagccactgcctgtaatccagaggaacattgccggttgacagttctaacaggaacgttttctgcatcgacagaaaagtaaaatcaagcaaatgaaaccagtgtccataataaagaagccctgtcttcatatggtgatataaccgcaaacacagtattaccgggaactccagcatagaaagccgcagccctgcactcgattgcacgctgcgagcctggacctagcaccgtgccaactacaatgtcaccaatttcaccagggttgatcttagtgttgtccagaacagcctagaaaatacatagaaaaaaaaggagcaaacgattgattgagaacgcatagtctctaaattcgaagtaaccactgaatcacagcatacatgaagggcaatattagcaggcgcaaacctttagaacaacagtaagaaggtcctctgggtatgtatccttgaaacctcctcgcttggccttgcatatgggtgtcctgtaggcactgcaggtggataaacatggaataaagtggttagaagagtatctatcacatccgttgatcgattcagatacgtggtggcatattcacatggctaagcacacaaaacatgctacagccaaaaaagaaacactaaaaaaaaaacaaagcttagaacttgtagtttgtaatacactttgggtgataggtggtgaagagatagaattgacttgtagagtttgcgatcttttatcttgttgcaaaatagcagtaacaaactcttcttttttttttgcgggggtaacaaactcttgatttagtatgatttcagctactagtacaaggtttatcctaaaactaaagaggttaacttcaacaaaacgcatttgacttggatgggcgtacatcgcgataccaagcacctacagtaatcctgattcgtaagaaaagtcaatcagcgcagttgcttgaatttactactattcctcaaacatggcagcaactagtggtagtcaaacatccgccattaacaggtgaccttaattggtgttccgtgtaagtaataacaggtagtagtaggaaaaaaaaagggattagggatgtaaaagcttacgcgacgacgacgacgtcgtccccgtaggcggaagtcctctggtaggcggcgctgtccccggcggcgcacgccgacgcctgaaccaatcaaccaacaatcgaattgaattgagtccagtgagagagagagagagagatggagattacaaagagaattgcgagagagaggaagaggaattgactcacggagaggagcgattggtcggaggaggaggaggggaggaggtgggcgaggaggacgcgctggcgatcgatcgccttctccatggctgagatccgagcgcgcgagctggtcgtcttcttccttccgatggggtggggaagcccgccgcggtgtctggagaagattttctcttgttcgtatcgctctctctcgcgaaagcgccgattacttgacgcaaccaacgttgcttctgctttgcttatgtaggcgccactaccggataagctgcccactttttttttatttcctttcgtactgcttccagattttcttttctttctttctttttttctttcacacaggtagtactagtagtccagtagcagcacgtcgcttgcacgtaacggattactattttttttttgctctccgtattttgcctggtattcctacattcttgtgtgtaacagtattgttgtctgaccgtattgtacagtattctcgtatctctgcctggtaagactacgacgtgggtaagtgagcagttacaataacaagctataaacaggctataaccacgtaccgagaagaaaaaaaaaagagaaaaaagaaaacgggctacagatttatagccagctgcaacacgaactctaaaacgttatatctaaaacgttatatgtatatgagaggtaggacctgttattaatggtgcagtatatttttatagataactattgtatgaataaactattatattagttatagatgatttagagccaacggttggctattctattgaacttgctctaattgtgatgatacgagtgcacatgctaatcgagaatccgcgccgaatggtgatggtctgatggagctaaacgtggagttcgtctgcttccatgcttgtgctgacgtcaggcctgacggcagctggccggttggtgttagttgcagttggataagaaggccaggccggtagataaagacaacagcagccgtaacagccaaggtctgcttcccacgatgacaaagcccatcttgtttcatgggcttgggcctcacctcatcatcacaacggcccagccaggatcacgtccaagcaaatgcaaaaaccagctcaacttgtccaaaacgacttgcatttttgcaaagacagtaaactctgctgaaatttacaaataagcttcttcttcttcttcttcttcttcttcctcctcctgttaacgaaccaacagtaggaaggaccaagttgtgagttttcaactgtcgacaaatttcaatcaaacgtcaaccaaccaatcccttctgaacaatttttacaccgatttgtacacgagggccattcttgccttctccatcaatcatcatcaggatcaggtagggcagatttcaggaacagggggatcgccatggagctttgcctgctgctccgaccagtaggcctgtgcggcgagcacacggtccaggagttcctgtggaactggagctccccttctttgctgcggcgctatgctcgccgtgtgcaccagggtcttccacttgtcctggttcatcaaatattgtttcacaggttttcagatagtgcatcctgatcctgatagaaagaggcagatctgaagaaaaaacgagatagatttaggcttaccttcagatcaacataggtcctatgatgaacattttcaaatgcgcggaatttgacgtccctccacctagacaaccagatcaagaggtccacatgagacacgcgaactgcggtgatgatctcgtgcctataggaataaaactactggggcattgaagccacaaaccttcctgttccaaggtgctcgacggcttccaccagcaactccacttcagcaacagtgaaaggcctccttatccgtctttgcccaaaatctggtcgctttgacctagaaagcggcacattggccagcgccagtgagtttggatctgcaaaagggacgatggcttgggagcttgctgatgtttcttgtgtgctccattccacgggataatcaacagaaccaggatcactcaagctgcagcctggaaaatcttgcataagctgctggttctcagcaggttcttcgcatttcaccctggaaatggaatattaaaacccttagatgaccacatacagcaaaaatctatggtcgtgtagtttccgaaacttctgcaaaacaacaacgttgacataaactatcagatgcatcctgacaatgttttctaatcatcacatgtaaatccaagcctcctgtctaataatgcaaggagaagatgctttcttgtaacctacgtagcagacttgtccacaacagatgcaccaacaaaatccatttcttctggcactattacaccagggtgagaatcttgcccagcttcacattccagagtaaagcctatgtcatttagttttttaccacggcaaatcccagcctgacgaagcgtcttgttgtcattttgaatattttttccttgaagaagtataccgacacggagaccgcgttcaattatagtagtaacagcatctgacacagttttctgaagacaaatagaaagaaataatgtggttcataagaaagccaatgtctatgcacagagataaatatttaagtgtaaagcactgacaggcagaaatattcaacatatataagattaaaataagtgtaacgaaaaggcaccaccttttcactatgtataagtacgttgcatcactaaaactagaaaactagatcagtcaaatacacattagcatggatcacagagcagcaaatacttgatatatttgagtttccaaaacagctgacacaggataacactaacgatactaagattattgacagcaaatggaaagagtatcaggatgcacacatgaatacatggttgccaactaataaatatatgttacagccaataacttttactgagaagatacacatatggtgttttaccttcaatgaaccaactgttgcattttcagggatctcaattagtagttcagggatgttgaaagatttgatggttaacttgactgaaaagagagaaaaaagtaagtcattgtgtttataaattaagcaatgattcttttaagtcaaccccaaaactaaaataaacatccaggacgccatcatagccctcagatgcacatgcggatttggatcacccatacaaaatggagttccactggcagaaatggcatgcccgtgtatttttaggaagtgtatcaaagcaggggttcagaatatccaatgctgtgtgtaagaaggattaagtcgtaccaactatgtgcaatgttacatcctggagcaatctaaataatttgtgacctttagatacaataagggaaacggacaacacaatacatactttcagttaggatctgagtttttaataaagcttccattatcaaaaaatactttcagttaggataccttcatcagatgatttttcggagtaaagttgagcaagtcttttcctcttcaaagttgtttgttgcactcttcggcgcgtagtgggcatcttcttttcacacaaactcagcttgttacctagttaaatgataaaaaacttggtcaatataaagtccaaatcctgctaactagctgaaaaataaaattaagtaggaaaagaaagtatcctctcttttcacaagctatggagctgtagaagagatgatattagcttgaaatacctttacaagacatctctccacatatcctgttgcgagctgccttccttaacctggaggcaaacaatctccttatcctgcggtcacctatataatgtggaatataaccacggttatttcctgaggtgcttggatgtacacacccagaagaattttcgtcatcatctctgtctgcagcatgctgcactttagccaaacacgagggatgggagttatgccccctgtcagggccgcagatgtgcactcctgagttactaccagagctagcctcagcaagaggtttggtgtccaaatccatggtctcgaccaaagcacatagagctgcagcatcactatcttcttgacttctgattgctgttggtctcgcccgatgcacttgtttaacctctgctgatcttgtggaccaaggttggcatactccaacagatccatactccggaattgtgccaagaccaaaacccaatcgacatgattttttactgctaacaaatgagtccttagccaacacatcaggctttgctgttagtgactctagtactgaatcagctagattttgagtcgacgagttttcagccaagcacatattagcttgtctgagaaagccacagatgcctgcacagcctactgtacaacctttgcagtcatcttttttcacagccacgcttctcaacggaaacgcttcatcaaactgttctgctttaactggtttcatgcttgtaacataaccttctggtgtttcatttatgttaggtccactagataaattgtcttgatcagccaacaatttttctgcagctgtcgcaagcaaatcaagtgcatacatctgctttttccttattcttgtggagcgtttaacctgaattacaatcgatcattaaaacttaccaaattatgtgggtagcacacttaacataagaacataacaaaaatgtaccggcgccaatgttgcgacacgtggcttaatgggagcacgatggccatgggatccatagtccaacctcttctgcaacaccatgtcttgtccttgactttaggaaatgtgttcagtgacagcaaggggaagtaaataaaacatgcgccatatttttctgcgtcgaataagcaagatttagcgaacattgatccaataccgaaagacatcctaatacagctcacaactaaaagaaaatgctgaattctatgcttctgaaatggaaagaattcatcattggtgagccccatcaaaaccgataatatctggcaagatgacattcgctgaaaccacagtctacttgtagtagtatatctttgctcttaaaaaggacaaattggggttgatggtgtgctctacaccccaccccgacatctgagatgatgttgtctggctagatctgtgtatacacaaaccgaatcaaacatgtttcggctcggcaattattcggttcacacctagagcataaaccccatcccgaaatgcaatcgagcatctcgcgtaactgacgagagggaagaatccgcattacccgtcgacgccgacgaagaggagggcctcgccgccagcgttgagatcgccgcagctcggctagggttttgcagctgcgtgttccgacagccgaccaaccggagcgggaggcgcagatcggggagcaccggagcacggcggaggggagcagatggcgcgcgccgccgcagcgctcgtcgcctaggattggttgacgacgacgacgacgatgcccatctgctgcttctgctgtgcatacaagaaacgaattttgcatataagtttccatttttttctccttttcttgaaaacatacaggagataatcagagcaggaaataaaatgaaataatcaggcaggttgtccgatcaagaagggtaaccttgtgggggatgggggaaggttccagaaggttcgagaagagcgggcggggaggaggaatcgctgcaagtggaaggcgcagggaggaggaggaggaggagagggagaggggaaaggattggaggagaaaaaccccgtggaagagaagaagcgaggattttccttgtgtttcttgctgttttttcttttcttttttttcttttttttttgatgatgggaagaaatggttttggggcagagtggttggttggaggtgggcttgcgcatgatgcatcacggcccattggatgatggatcggttgggcttaatttttgtttttggagcaaagcaatatgggccggcctggttatggcctggttatattcgaagatgggctgctctataactggaggcccaacctgtattatgggatgagatcccaaatgcaaaaatcacacaagtttgtcatgattttgtcgtaagatctgtccttttacgagtggaaatgaatagattcacgggccatggacttttctaacaatagattaacgccagcgcacacttcctgggctcctaaacaagtgcatttttttgcaaaaagaaaaagaaaaactttatatatatgaacttacttgtataatccattttccagctttacaatagttaattcattcgtttatacccttaatagttatcacaaatcattcggctattcaacaattaattaattaagcacaaacattcagggcggtgacaagatggggtctaccctgagaattatcctaagaacttggaagttcagggacccatgcacaagcaactttgagtttacgctacagttaattaatataaatcggaaaatatctctcaagaaattagaagtcaactaacacaaatcatattccccttatgatgcagttcttttctcccgttccattgtaggagtagtagctttcacttgatgcatctagcactgaatctacagcaaacggccaagctcgactgcaagttcagcaagcaacttggcagatgcatacacagcatcgaagcatccaagatcgatcgcccacctaacacggcgagctatctgttttccagcggcgaaagaaaccacgggcacggcgagtcggctcaccggccggccggtcggtactcagtaccaaaccaaaggtcaggatgatccggcttatccactgccacgtgacctgggcccaagagaatcccgccagccaatcgccgcgcgccacgtcgcccgctctgtccctgtagaacacacaatcatgtccgaattccacgtcagtccacatccaaacttggagaaatctgagagaattactcacactaacctgacttcttcactgatgaatgcaacccatcgtacttggtagtagtagtacatatccatataaccatatcctgtttcaggccttgtcagtgacaccttggttaaaaccacccatgcaccattctgctgctctcaaatcactatcctgaatacactaatctcaatctaattactaagtttcagccaaacctcagaatatgcaaaatagtcatcttcagcttgcaatttgcagatccataagttttgccatatgcatggactatgataaatgccacctctgaatctctgatagcagaaacaaatgatgatgagatactaacaagcactaatggagtattaaaaaagatctgagcatggatgaggtcaaagtccaccaataggatctgagcagtagcagtcattggtgggccagcacctcccatgcattcctatccacctcagctccctgacaatagacgcaagtatccagttcactataaatgaaggcctccggctacgatctgcaggagaaaaaacagtcagaagctaaggaagaaaaagtatagacacagtgatacaatggcctgcatcaacacattccagagctgctccgtcctcaagggagcaaagatcaatggtaccaagatcggaggagggaggggatcaccaaccttccggtgccgggcatcgacgttcatggacgggagcctccggctagagatcgacgagaaccctgaagccatcatctccggtgagtggccggagaacttctccctgctcagctacgacgatctccgcgcctacctccagtcacaggaggccgctgctcaagccgacaaccaggtgcactgatcacaccatatatacatagattcttcttcttcagatcaccaactgtcgatcttcttcttaagatcttgctaaactctgaactggttgcatggttggtgaattgaccagcgtgtggcgctcctgagtgaagccatgtcggcgcctgtgctggtagccactgccgagcagacgctggaggaggttgagtgccactttgagacggtctcaggtctcccagttatagatgccagcctcagatgtgttggagtgatcgtcaagagtgaccgggccagggcttctcatggggtcagctctctttctcctctcacacacacatacatgatacatatccctctcactcacgcacatactcaacaacaaaaataagtgctgatctattgcttcttgtaacagtcaaagacgaagattgcagaagtgatgacctctccagccatcactctaccatctgacaaaacagtaatgggtaatccatcgttgttttcgcccttattttttttggttattttccacttagctaccagttaagctaacaaggcatatgcaatgtctacagatgcggcagctctgatgctaaagaagaagatccacagattaccaattgtaaatcaggacagacaagtgataggtgagttttgagcagtggccaatacagaaaaaaaaagggctttcattttttccccttgattttataccatccttaacattgataattcagagtatgttgcatgctaaatggagttccaaacactattaacaggtatagttacccgtgctgacgttcttcgcgagttggaagccctgctggaggtttagacgtgcagtggtccatatgcttcggccttgttgtatatatgtaaatatatgccatggtgtttttgaatagcaggcatctctaatctgtaagagtgttgtagcgcgaatcaccaagataagcctgagaaaataaccggagagcttttctttgtacaataagcacactatgagacctccagtgttgtatgcctgtgaaaaaatttacgttagtgaatggtctccacaacaacatagatgaatgaatatgcctagttatctttcagaacaaaaccaccaaggtgcttcaaagatggatataaaagtgaccttattgaagtttcattgtcagaggatgcatagaacaataggacttaacagaagaaaataggaatgccgatgcaagagatatgcctattcggctattcctttgccacttctgagcactaacaggaaagatggaaatgtgttatacccagaaccacaacaggtcaatcaagatagatggaaaaaaaaaaatcaacaaacaccaatatcgaatgtgacaaatctttagataaaaaatgaacctaatattataagctgaaggaaccgtagctatttcaatctcaggaagacccaaggagaaagaacatactcaatctgtatgtcgtggcaatgctgaggctgtcataactcagattcgagttgctgagacttgcccttgttgatcttctcctgaagcaatactagcagcagaaacgggcattgatgtagtagtactcatgttttctggtgaatcagaaatgactttcatctctaggtttgggattacaggtggctttgtcctccgagtaacagtcattttcaacccctcagttgtgtgaatcgttgctccagttgtcatctcaacctatcatattgatacttcacagtgattatctgtatgttgataactatgaagaaccaggaagcagacagaaattataccggaggagctcctggagccatttgaaaatcaaagcgcctgacaagcattgcagttgccaccacagtctgcatacaagttccggcatatccatgttattagagttggaatcttgcatgctcaatagttattgtactacattatttatcatggcatgagatataatgtccttatggtagacaacagaaggctcaaggcaacaaggttcagtaagactggaccatacataagtttgctatgtttccttaaaatgacattttgaaattaaaagaagaaatccttcaaaaactaaaacaaattacctcgaaagtggcaaacatgtcacctacacatttccttggtccgccaccaaatggcaagtaactgagaattcaacagaacacgtgagtcccatttagctatgtagattcatcaaatatattaaattagccagtgaggcagtgacagctaacagatgctagccgcaatacacagaatgaaagctaccacagcctaaaattggagcttaaaaagtttgacatgccaactgaaaatcaataatttggatgttgtcttgaaagaaagatgtgttccgcagtgagttcaatctaagctgacaaaataatgggacatgtcatgtgccaagtaaatgcagattaccatttttaagtttcagtgtgatgcctaggagacttgctgtacattatagttgatgatacgttggttgtttttcaattaacatgatttgcaggtcacaggttttatgccgtgcatcaactccctgcaagactgcaacacggaagaagtttgtagtccagtcggaagtcttcattaactcaggatggcacgaattgttacgtcttctaatcaagtaaggattttgttcaaagcacctctgatgtttgttgatccatacaaagggttctgctgttgacatacttgctacaggtaaggaactcatacgacatactatcagtttatacaaaattactattccaagtactgtttctgcgtaaccagttaacagttctggcgatgtggtaaagttgaaaagtactttcaagcactatcagtttgaaagtacaatagcattttggcacatgttgcttatagccatatgaatatcattttaacatgattgtcataaactgtggtttagctcccaaaaccataaatttaggaatcaagtcatcacagttatctcatctttactgcttcaaaagaaaaaggtcccatttttctttatgttgttgtgactgccttatgcactttctaagattgtggctatgcacatgccagcattagcactaaattaatacgaatcacatgaagaaaatttgatgatttgcatcaaagaagaaaacgaaaatcagctagagtttttgtttttgttatctctagaataattacaacaggtgcatcgcatgaccaaataacttagtgttagtagatgtaaaaacgcaaacttctcgtcaaacaagaacacaactataccgagcataatcaaatgtctactgatttttgtagtagaaagcagaaactaataaaatgggggaattagagtgataaggtgcatccaaataaagagctaatgcatttcatagcattaatagagatggaacctgaaattttggtttgtttcatttggatttggtccatccaaaggccatctttctggattaaaaacatctgcaccatcccaatgctttgggcaatgatgtaggttccacacggatatgaaaatgtcttctcccctgggaaacaaagggaaaaaatatcttatcagaattataggtgaagttcaaatttgtactgaaatttttaaaaaggaacaattcagacaattaaatactctagagctacgaccagaaatggtatacaagcagaagacaaaaatatatcacacaagattgggaagatattctctaaaaaaagattggttagataacttatacttgcacatatcttaggccctctttgtttaggcttataagccagcttatgagctgaaaagtctaagcctaaacaaacaaacagcttttcgcatgttttttttaaaagccataaaccactattacactattaaggctcagcgaactgttacactattaagacaaaagctaggttggaaaaggttttttggcttatgtgagatagaggtatgactccaccattaaacttaggactttaaatccattggcttataaatcatataagccaaaaaaactgacttaaaatactaaaccaataaacttaagcctaaataaagaggcccttagactcagtttcaccagaactttactggtgtgatactaggcatgatctttctgttttcctattccaattgtaacaacagtcaacaggactacaggagagatttcctacacttgagaaataagttctgctagagttttctttaccggccaattgggtaccctcccagcatatcctcctcaatagagcgacgaattaaaactggtggctgtggatagagtctcaatgactgcaaaagtggtgattgaatgacatattcattcagtgatcatactcattgtttaatgaggtagcactgtttatcacttacttcgttaattactctagtagtatacttcaatttcttcacatcctcaattgttggtaaacggtcacctagaacagtatcagcctgtccataagtgagtgaaacaagtcatttgcaacttgtaagatgtagaagcacgtgcctctaaaaataacaatcctaaatgtaaaagcgaatttacctcatcttggagtttggccattacatttggatactgcaagttaccaatgccaagaaaggtaaaacatgagtggtttgacgtatacaatattcatcattacatattgctacattaatacatcaatgatttgagttgctgaacatattttcttttgggaacagctacggaacatattgataccttagatagaagataaaatgtccatgtcaagactgctgcagaggtctcatggccagcaatgagcattgtcatcagatcatcacggagttgcttgctggagacctaatgaagacaaattgaagcaatgtgaggaccagaatgtttggagatctataatattttaaactgcaggtacaccatacatcatctccagatgccaaaagaaagtggaggatactggggtcttgctcattcatgtattcttcatgaaactgcagatcttcttcctcgaccaatctctgcaagagtaacagcagccaatctaaaagccttgatttttttaaaaaataaataataaggtcagaacataagaaaagaagttcaccttgcagatgtcaattagttcatcaagagtcttatttatcagcgcaagagcttcattgaccttcttctgccgcggggaaatatctttccatatgggtatttcccaagttggtataggagaagtgctccgcatttctgcttctcgcagtgtcacatacactgcctgatcatcaatccaaaaaaaggtaaaattttaagaaaacaaacatgaacaaatagaatgtataatgaattccaaaattacagtacaagactgaatactaacctcaactattccattatcgtaagacaatgagtcgaaatcataattgaagactgccttcccaatgacatccagtgttagtcgagagaacaaagattccatctccacatcctccccatccgttgctgccttgtccaacttctggcagagccgatctgaagcatatccgaagagacttatcattgcggtaacgtactgcaaagcgaaattcagatcagttcaatcacaacccgaagatcaaatcatgctaaacctggtacagaaatgatgtagaaccttctggtgcattgctggtacaatggcgcgcctcctaacacgccaaatctccccatcagcagggatcaaacccgtacccatcacaaactctaaaatttctgccagaataccctgcacccaccacaatcaaaatgcaggccgttaatttctagagcacagcctagaacacgtctacatccaaaattgacaacacaaaaccttggaataagccttggagttgtccctcaggatgtgcttagctatagctggatcagagacaatgaggaaagactggggaaaacaagaaaagaacaaagtttaggccatcaataataacacaaaattgggagttgccgagttggagagcaaattggtctgattgtgcatcaccttagggccgaaattgaggcgaaagatgccgccataggtaaggaagagatcatagagcgggatgaagaaagcctgccctgtcaccgcactcatagaccccaccgcctgcggtatctccggtccgccgccaccggcgaccttggtgagcagcgcggcggcgagctcccccggtgggccgagcttggcaagccccaccgcgaggggagcaatccacctgaaaaagagagagggagctctccatcagatcatcaaaggaggaaggaaaggcggccgcaacgtgagagagagagagagagagaatgagcactgacgcggggccttgggcggtgaactcgccggacgcaatgcgcgccgccagctcagcctggcgccgccgccgccgctcctcaagaaccgggtcggagccggagccgtcgccaccaccgcctttcccgttgccgcccgaggcggcgcagcggaggagcaggcggcgacgagctgaagcagcagcagcagcagcagaaggaggaaggcgcaggtgtgcctgaccggagccgagtaagcggcacggaggtggagcagcggcggccgcagaggaggtagccgccatggcaaaggcactcactgacgtcgctgagctcatcgcgagaactcctcagtggtggagtggagtgatgaagtgagtggagtggcgcgaggaaatcaatggtggaggtggaggatgaggtggtggtggacgtggggcctgctcctccgtttgttgagctgcctttcccgcgcgcgcgcgactcccggccggccaaccagacagacaagacaaccaagccttcctccagagatgctactggagtgtgtaacggaatctttgcagcatcctcctcttcttctccgttgctacaattgaattggcagctaggatcagtctcaactgataaaacatactccctccgtctctagatatttaacactggtgatttttttaaacatatttgactgtttatcttattcaaatttttttataaatattattcaaaaacttgagtagtaatagtatatttaagaacgaatcaaatgataggaaaagaattaacttttgaataagacgaacggtcaaacatgtttaaaaaaaaatcaacggcatcaaatatttagggatagagggagtactacatggaatagaagttatatcttatacttcatccatcctaaaatatactctatccgttttaggttataaaacgttttaactttggtcaaaatcatattgttttaagtttaactaagtttatagataaatataataatatttatagtactaaattaaatttatcaaatcaataattgaatatatttatttttttctacaaacttagttaaacttgaagcagtttgactttgaccaaagtcaaaacgtcttataacctgaaacgaagggagtagaagattttagataaatgtggcatatccttgaactataaatctatacaagttaagaaaaatgaatctagacaaggtaggatatgtaatatttaccaaaaaccacttatattttgggactgactgagcagtaactaggagcaagattttctttgaaaattgcactaccaaaagactgcagtgaagaatgggaaatcagaatatagagataactgcagactaatcatggtaaatttgatataccgacagaaagtgcaggttttcgtgtggcggcagttggggcttcaagataccgtgaattggatggtattggcatttttataccttcaagtgcaaacagcatttgtcctggagttggatgttgttgccagagtataaaattggaacacgctgtagcataacagtgatggcaacgtgtaaaacaatcataagaggttcgcattttaatttttttcattttgagatgatcaaaggaagatcatgtacctggtaggtataacacaggaaacagtctccatatcctatcagctgcagctccaattgaacattcagatgagatgaatccaagtgcagcctcttctagtacaaactgtacaagagcatgggggctctctgaagagatgattccaatgcaactctttgcaagttttcgaaggaagacattgacacgtccatttccatcatccaagtcatcgaatgcagccagaagaaaagtagttttcacaaggctccaactttgcattcttcctactaataaatggagcggaaatagagaggcaattttatgttatcttcaaggtggaatcaatcatgtcgtggagaaaagaaagccatctgtatgtgtttcaccttttttttttaaaaaaaaaaatctaattggtaactgaaggaacacggcgcatgtcgataagcatcctgcagcttggagccttgggcaaatcagctggccttcttcagataatgcttccctcctaggcattggcccattccgttaatcacctgaagaggacatcacctgaaggggacaatagtagttttaggaacaggttaagacttaagacgttcaaaaacttggaaagccaaatgcagtgagtccagatgagccgagctccgaaatatgtaccttcgaatttaaaacagttttcacattgaaattgatattttttttccacattcgcctcatctgattgtggacatgggtagaattggatcccatatccaagtacagaaagtgtgcaacatctgttggtagttacactaaagtgccccccagactgtttttaaagaataataacctctacagagaattggaacagtgaacatcagggaatgtcagtaaaatttaacagttgctgttgcaacagaaacaacatgttcagaagctcaatggctaaaaggatctagcactgcaacattgattcgacacgagtggaactagtgcgcgctagtggtggcgcagaagcttgaagcaaagaaaattcagcatatctcaacatctggtacgcacacgcacatcagctaatggaagaaaagccaaattaatgagcagtcatactgcacaaatcaaaccactcgcacacatttgttaagcaattattaacaattagtattaatttgcccagaatgtgttgttactgatccgaagtgcaaatgcacacagatttttgccgtgatccaaacaatagctaaatcggagcaccaaatcgaccacacccaccagattttgtagcagacacagcaaaagcagtaatgtaggagtaccttggaatgaaggagatcgatccatcgttgaagccctaggatgctattcccttcctcctccaccgcctcctcgctcgaaccgcatcgttgaagtaaatctacaagttcatggggtccgtgggcacctggctcgacggcggttacgtggagagacgccggggcgtcgcgccggaccgtgcagcctgcgggtgggaggagatagggggtttgggattcggagaagacgcaggaggagaaggagatcagttgcagttgcggatgcagcgagctggagcgattggaggaaggattccttcgagcttggtttcgtgggagggcgccatgggtgttcgacgaaatgctcgagcgaatcagaggaggctattttttttttcaaaaaaaatgaattaagaactcattaacgtataattaattaagttaatattgtttgtaaaatgattaatatgaatttaaaaaacaaattttctttatatatatatatattaaaaaaataatgtttaatagtttaaaaaacgtgcgtgagttgagttgggaaagtaaaagaaaacacagcggtcgaacggacttggcagagaacgaatacaatccatatcgctgaacttgtcaaaaaaaataataccgtatgtatatctccagaagaacaatggcaatgtagttcattagtacagcatcggcgtgtaccattcataagaaaaagagcagtattagttcatatccaaatctcatgctatagcttgacatcctagagaagtcttgctgccatagccccacatcttcaagaacaattatttgtgcaaacgttaatgtcgtctttaaaaattacatctacctgctatacaggatgatatcagctaggaatcacaatcctccagcagcagataaatggccatggattgcattgtcatatatgcatatatttacaaaatagcatgaacatggagcacagtcagctttgtcagccactgtaacaccgaaatcttgtgtgaatgaaatgggataataggcatataggattacttaaacgtcgtgggaacgctggaagattaggagcgctacatcagctattttttttataaaaacccttgcgctttcggttaattatgtgccggtccccgctgttgtccaccatccaatttcgccatagggtcgatctggccgtccacgtgtcccgttgtgccggcccttccacgcccgtgcgatcgtcggattatggatggacggcctggatttcgcgaaacggtacaaaccatagccgcccgtcctctcctctccccacgcgcgtcggttcgcccgcctcctccgctcgcgtgcgccgttgccgtcgcagctccctctcctctaccgtgctgccgccgccgctccctcccaatgagccgccggatctcccagtgaggaggctggggccgccggatccggtgaccccggtctcctcgccggcggatccggcgcccagacgcccaccttctccgtcgctgccacagctcccttctcctctaccgtgctgctccagccgccgccgtgtcactctgcggccgccacccttgctcccgatgccacacgacaaaagtggtggctccttcgccttcgcctcctccgctctgttcctctcctctctccaactctcctcaccctcttctcctcactttttctacacctttgttgacgagaaaatcgaacacatcggcctgggagatctacttagctcctgtgcaggtccaaagattaatgagatgcgggcgtgccagtcagtttgatcctgcaactgacaagatttgcaaataatagatcaaacagccgatcagctgacaagccgatggagtagttccagccgatagccgataatagatgatgccgataccagccgatggcgatagggtttaagcaatcggctatatgtccaatgtagataatgatataaaggcaatcggctgatgataatataatatagcaatataatctagtataaaccaatcggctaacaatatgaaatagtagaacaaatattgatctgtaggttaaagcacacatcggctgcaggtccgatgtcataagatccacaagattagattaaacagtgaaacctttgttgccatcggctaaatccaacttatatgtatatgcaatccctacaagccaatgcaacgtccagataacttatcggctagcaccccgataaaacattagcatgaacctatcagcttaacaagacttatattatcaacaacaatctagtagatcgaacctaaccgatgcagcatgagattgtatatgataatctaatactcgatgagccgatagatctgtctaatatgatggatataacaaatctatttagaaaaacattatgattgtagagatatatcggctaagacaggagatcaaacctaaccgagacagtcccaactaaaccgatgcgtctctaaacacaatgcaattagagatagaattgagatatcaggtaggcaaatatatcaaccaaaccagagcgatccaagagatcgaatcgatgcagccttgaacaacaccaacatagccgacagattcacagggcccgacagaacgtaggacttaccccttcgctggagatcgaaagccaatgcagccctgcgtcaggtgcccaagttccgccggaagacaagtaaaaacctcagggaagagggtggcgatgtgccgagagtattattgatcgatagattgatagattacaatgaccccgggtgtacatatttatacccatagggagatactagtccttgtcggacaagaaagaaactaaaaaggaaaagataaagtccttatcgaacactaaacacactttcctaaagataaaaggaaactaacaaactatgcctaattaataaataactgtcatgtcgcatccttcttgaactcgaactcttctagataagcttcctttgattgatccgactccaccaagaacacgacatcgtggcgacttgactcccatcggctgattctagaactttgaagccgatactgactctaaatcgatggtaactttgggcttaccaaatttcactattaacaaccttcaacgttggctcgtcccgcatcctgtcgcctcgccccaccctttcacgctctccgccaccgccgccctctattcctctattccaccgccgtcgctgccctctcctccgatgtcgatcccgatgtcaccacctccgtccaaactgcctttgactgtgtgccaggcgtcggcacaagccgccggtggtacttgccgccgtcgatcctcaatcccactcttcccctccacaggttagccctaaactcccttgctccccatcctccatgtccctcttctctcttttccattggaggcaggtgcaaggagcatttgtttttgtttttttctcttcgcaattttgtaacatagaagataggatgactaaaccattgtggatcccataatattaaacatgccagttctattgaactttttatatcttgatgaatgtgtatgatgatttacttgatactactttgatcaaacacacatattgctatcatggtcttcttggatgctatattgctattggccaacttaagatgcttgaattaggtctttttaagacttcatcagaatagttgcacctaacaaagtaaaaaccagcaactttgatggtccctaaagatgtcgaatagccgtatccctaattcgtcacattaaatctgaatgcaataaaatttgtgaagagaacttgtggattaaggaagttgcgcttcattttgatccactatcgtggcctacccactcatgagtggactatatatatgtgtacatgatctaatttattatccttgtgattggctgctgtcattgtgctccatatggataacacaaaaacacacacacacacacacacacacacacacacacacacaaaacagaagcatcgccttgcagttgcacttgccaattattgtatcttctatttggaggtttcgatgctcttttgttgtaaatgtttaatactaagttgccaactattatagcttctatttggatgtttggacaacgaggttgacgctggcaaggccgtgctcgcggcgtcgcttcctggtacctccaatttcttctctggcccttacctcatctctgttgccaaagatttccttccaatcggcaacccttctttcgcagtgctaacaaggacgcccccatgtggttccccgcttgcagttgggcctttcctccatttaataaagcctaggatacctttcaaatgtatgcaatgattctctttgcttgccaaggtaaagttcctttttagactgctttgagattaatatttgtgcttcttcttttttgccagcataagatgtacacttagaaacacaaatagtgtggatccatctcaaagcctttaggatcataatataaatgccctactgtttttttattactgcttattaagcttctggtatccctccactgcatatgaagtgtgacatgtctatgtgagttctgtttttccaacatataaaattataaagtcatcatgacctatttaaaactgaaattttagctatcattgacctatgctgaagccatgtgactttttttggtttacaccaccttacatgaggtgcatattaaagtctgtgtaccttaatttggttcttcctcttagctagaggtatactaagacatactagctaggagggcctacaatccattgataatgtctcactgaatgcaaattaaaagagtcttaagtatctatacagatgtctccagattttaactatattgtgcaaagatagaattaactaatagaacaacaaattgatgtggagaaaatctctgtaataatcaatgtctgctgcaattgcttattataattcatgctctgtacttgcgcgtgatgatttaaatttcagaataagtgtacagaaaataagttgcggtgaactgtgatttaaccatgaccagtgcccgaagaacagcatggagattggagagatgactggtcagacaagagcctttataggaacaaaatgcaacaccgtttattgttgattgggtcatatacaaataatgcaatccgcttatggacaaaaatcaacaaggaagatgcagtacatactacattctggagaacttgatagaaacaagcaagcattttaggtcatcaacaccaccaacaacaacactactccagcacgtcgcagcagcagataacggctaacttgcaaaatgaatacccttatactatacttcctccgtttcacaatgtaaaactttctagcattgcccatatttatttagatgttaatgaatctagacatatttgtttagattcattaacatctatatacatatgggcaatgctagaaagtcttacattatgaaacggagtgagtactatactacctatgtatactacccatgctataagttcattagtatagagttaatctgaattgttggatcgatagtacaatccactataatatactccctccgtttctaaatcttttaacaccgttgactttttagcacatgtttgaccgttcgtcttattcaaaaaaaacttttgtgaaatatataaaactatatgtatacatataagtatatttaacaatgaatcaaatgattggaaaagaattaataattatttaaattttttgaataagataagtggtcaaacatatttaaaaaattcaacggcgtcaaatatttagaaacggagggagtgcgatggtatagagcaccgcaaagtaactctaagggagctcagttaggccatttacaatgcagtgatgtgtcattctccctcgccattccacgtcggcaaagcaggagggcacacgccacgtctgcttctaggcccaccagaatgaggttcgagtgtccaaagatggccactggttcttggcgaaaaagaggacgaatgaagctgggagacgacgctgcttccgcgttgtggagtgagtggcatcgccctccttcccatgccagccgtcgccctccagccagccgcctagcccaccgtcgctgtccgcagccatcgagctcgttctcgtccctgccatcggagctcgccggccacaccgcccccgatccgctcaacccgaagctcgccggccactccgtcgctcgattcacgccggtcggaggagagccagaggagaggggtcgccgccgtgggagccgaggtcgccggccgcgccggccttgcagggccggaagaggaggaggaggggaggcgctcgagcctccggttgcgagtggcattggagtgagaggcgccagcggtcgtgggggacaggaagggcgtgtcgccgccgcgtcgcccggagctcgccggccgctccgaggtcgccctgtaccgccagatctgcgttgccggcctggggaggagggcagcgcggcgacgaccatggtggcggcaacgaaactacggccgcaaccatcctcgcgccgcgcccggacgagccgtcgccactggatctggcaagctgccacgccgtcgtcgagactcgtcgctgccacgccatcttcgagactcgtccccgccatgcgagagcaggggaggccaagaagttcgccgccgtcgagcgccaagctcgccgccctgccaagaccgccgccgtcgtcgcctccttgctgccgagcgagtggcctccatgccaagaccgccgccatcgtctcctccttgccgccaccgccgtcgtccccagatccaccgacgctccgcccggccaccccagcgccgtctccgctcgccactgctccgcccggccccgtcgccgtcgaggccgccgctccgctcgaacgcctcagtgccggctccgctcgagcgtgagagaagggaaggagcaacgttgggctcgaggaaagggagagagagagagagagcggaaaggtggagaaaaaaaaaggaaaactacatttttgtggaccccacttgaggtactgcattgtgcagcttgtgcctctcagtgttcctcagcatatgtggcagctcaggtccggcattttaggtgacgcattgctattgcccttaaaataaaataggttggtttggattccgagcaagctgttcccggattttcttcttcagttcaccttccttgcgccttgcttcctgttcctcttccgcccgggcagtctcataatcagcgcccgccgcgcgcgctgctcttatccttttctcatcgaagtgaaactcaaatctgagctggacttcgttgatgtttaggagaaactctagcccagaaaacccaatttcattttttattagcccttcgacctgcagccgctcaagtttgagcattgttccttcctcaaacttcactgatttggtgccccataaatctgcaagcttgagcaccttgaggcttccaaaagcagttccagtctgtggaggcttgaaatgaaattcttcaccctgaaacggtgaaatcactagaatttccagcttcggtagtttcccaaggaattccatagcaacatcgtgctccaatagcctagcgcccactagttttagcttcacgagatgctggagctccttgatccattccggcaacgttttcagattgccgtatagcttgaggctctgcaggttttccggaggcgaggatatatcatccaagcaaccacacaaacccgacatccctgctgaactcacagacagtgattccagcttgccgaggttggaaatggccaacctaaacgctcgtccattcttcttgttgatgccagccactcctaacttgtgtaatcctgtgagcattccgatgtctcgtaggatggcatttccccttccgatattcacgtcccttagtgtgtacaagtctttcagatttctgatcccctttggcaccatagtgccattttcttcatatactcccctcatgagagatgggaatttcacgcagcaagcgaaagtgcatgcatcacgcctggtaagggccttatggagagggccatcaatgtcccgaagaagaggaaggcaacatgttgcacatagataccccactttacaacgcctctccattaaatcatcctttatccccgttacagtctcttttgagcccaacatggatgtactgtagcttctgcagcttgatgatagtttttggcaaagcctctacatatgtacctctgatgtctagcatctggagttgcctcaggttgcccaaaaaatctggcagtagatcaataccagcgcatcctcggagagaaaggaattttaggtgaataagcttccaaatctgatcaaggtgatgatagtttaggcctctagtcccttcaaagtcgagcactcgtataaacctcatcttgctagaaaccaaaaatggctcccaatacccaaacagagatagcgatcgtattcgggacaggtccactatgcccttgaattaatccttatctcccttccagttgctacttatagcaagatgacgaattgcgccatggatgtacgagctgcagccttcctccatcctaaaaacaaggtttccctccattgactttgagatggcgatgtcacggatgagatcatggactttgcaagagtcaattgatttcctgctgcgagctgattgctggaatggtaaaatcatgcttctattcttgagttccatgaagtagtcgtcagctatttctgttagatttaattgggtaattaatccatttaaatcaattaaatcaaataaattccaaggctcattatgctaggaattcatgtgaattcattcttctatgggatatcaatgggatgaagagttttgagaattaatccatttgattaaggaattggtaacttatatcaattagtcctaattgatggatggttgatggttgtgtagtggaggatggttcatggctagttgatgacaattagttgctctattcctcttcctattccattggtaacttacatcaattactcttaattgattgttggttgatggttgtgtagtggaggatggttcatggctagttgatgacaattagttgctccattcctcttcctattccatgactcttactcttcatcttccattcctcttataaaatgagaatggatttgatctcccgcgagaagaagaagacacactttcatccattttcaaaagctgttgctgctacggtaatcccatcccgacgagtgtgtgcacacgcgttgggagagtaggcctccgaaaccacgcgttgctgcgacgtttgcacagacgggcgggcgatcaggtttttggggagcgcaaggcgcgactactcactgttcgtcaacatctacttcatcttcaccaacatgtcgaacactggagacaaggagaaggagactcccgtcaacaccaacggaggcaatactgcctcaaactccagcggaggaccattcttggggtataaccttattacattatttcaattagaagttttactgttaatgttcatcgcaatgtcaacattgtgtcattatgtgattgttgatgcttattcaacgttaagcatgctcatattgattacattcaccactgtcactggatcaaatcctattgtaaatatcatgtttattatcttgttattttggattaaaatatgccgaattatgaccaaatttccaacaatttcaacggcagacttcccatgggccgcagttgagtaaccttctgctgcccaccgatgcaccaaacgccttcgactaatgatctggtcttcaggaaaaatggacagatataaaaaacatgacttgagatggtagggtaaaccatcatagcttttttcaaggacggttcttatcattccaagctctggattcatttccaactcagcactgatattctcgttcaattttctccactcttctggggtctttggtcggtttgccaagaatccacctatgacaactatcgcaagggggagtccatcacacttctttaggatttgttttgcttctttaaccaactcaggattcttctgctcatctaaatatgtagccttctcaaatacctgacattgatacaatttaagctttattgtgctctaagtaaaacaaaaaaataattaagtttagaaatatgtctttactattaaaactagggaatgaagaccaccgtcacataccaaaacaaggtcacatctaacatccatccaatgcaggtcattttaggaagtgcatcgctatggttgtttttttacccaacccgctattgttgtgagaacagattaaattgtatatgcatcatgtgtatgctatttctgtctgcacaaatatcatcttgattggattactcaaatgaataaagaatatcaaaccaagaaaaatggagcacgcctatattaccttctcactcaagaggcacagtgcatcattaggtttaagaactagaaggttgtgcacagttccatttttccctgagcaatgattggcaatattttcttttcttgtagtcacaatgattaggcttgtcttttccaacagggggaataacattggttttatctggtcccattctgaggtatctgagaaatcatccagaacaatcaagcttcttttcttttctaaaagcctttccaattgcttagtcaactggtcaagctccatcgatgctagtgatttcttactgctgactctattttctaccagttcttctttcttagaagatccttcatgtagtcgcccagccaagctcctaaggagctctacaagattgaaaggacgcatgattgtgacaaaaacatacttgtcaaacttgtcgctcagctttgggctttgataaacacctccaactagggtggtttttccaaggccacccattccccacacagagatcacctgaacctgctggctattgtcttttaaaattaagtctattatttcagacatttctttctctcgcccaataagttgcgattcctccgaagcaccaacactcgtcctaatgcgagtaagactctttctaaccaccttcttctcatcagcatccatagattgatcatctataatatcaccatgggccactgtatgatcgtttgtacttgtggtggccacatccgagatagacactggcttcattgaatcctctccattttgggaaccctaaacaaaagagagcaatgattaagaacaacttttagccttaaaattttcatggacaatgtttagccttgttttcagtcatgaaagtatacaaaacaataatgataattcctttcattaatttgcagtatagtataaaccttagttttggatcctaatttgaaaaacttatatctgattgttcaataagatatgtattaatttaactttagaagaatgggataagtacactacatttaatccaaaggatgagaggatacatttgctagattagctcattttacaatcatctctctcagatagaggaaataaatttccgaattaaataaactgtgctaattggatatgaaatcaaatactccatatctaaattatttgtgaaataggagcttcaaaattttaattgtgcaaagaggactcgtgctacatttacatacttgtacaattttgtgggaaaatctgttagccaatctactacctccattatattctctaatcgaggcaatctttgctatccaatatatttcccttcaataccatcccttctactttcattagcattgaccgttcaaccttggaacataggatggattagaattcaaggtcgctggatatgaagggatgccagcaattgcagtggcagatgagggagatttttttttttgagggaaaagggaattttttttttgatgggacatatgagggaatcattatgtttttagttgccgttttttgcatcgttgtcttacttgtaagcctgtattagaccatttatttttctagcatacatatttgttttgacaaatccaaatacatatatttgtggttgtagtcttaaaatgctgagcacatgcattcccaaaaaggcaaatgagagagagaactggagggggcacttgttagttgcattagctcatgtgcttctaatggaatggtaattcccacgcacttcaactggcctacacaactgaattagaaattacctaaggacataactgaattaaaaatgatatcaagcaaattttttcggggaagcgtctggtcttcgaacaaattttgcaaaatgttcagcgcttccaatccagtgcaatgagacggatctccaaactctccatgatgaattgccatgtcaggtcgcttccttcccttgcacatatctaggattgcctctgtccatcttccgcctgaagaaggaagacttgcagccactggttgacaaaatcgcgcgccgtttgccttcttggatgtctcacttgatgacgcctattggccggactaccatggtgaacgctgtactaagctcaattcccatctacctactcatggccatcaatgcaccgaagtgggttatcaaagggattgacaagatccgtcgcagctttctttgggctggaaaagcttctgcaaacggcggcgtctgttgggtcgcatgggctcgagtttgctcgcccaaggagtatggtggtttggggattcctgatctagagaggttgggaatcgccctgaggtcacgatggctctagcagcaaagaacttcaccggaaaagccgtggcaagggcttagtattccggtctcgcagaaggagcgcaatctagtatcgatttccatggtatgcttggtaggggatgggaattcagtgctgttctgggaggattgctagctgcagggttcctccattcggtcgctagcgccggctgtctatgctgcagtccctgctcgtctccggaatcgtcgcacggtggccgaggcaatgactgacagaagatggatccaggacatcagttccgcgttgggtattcaagcgatcctagagtatttcaagctttgggattgccttcggtcagtgcagctttccgaagagccggactctctatcttggcggtgggagacctcaggagaatactcttcccgctcggcttatcgtgttctcttttttggaagaactcgtctccagcacaagccaatttggcaatctttggcgccccctcgctgtcgctacttcctttggttggtagctcttaaccgttgctggacagcagaccgtctccggagtcgtggtttgtcacacctggatcgatgtgttctgtgtgatcaatgcgaagagacgattgatcatctcttggtcgcatgcccggagtcgtggcaactgtggtgggttgtgctcagagctatcgggcattcggagtgcttaccgctcaatgaacactctttcctctcatggttgtgcgactgtctcggtggattcacctttctggcttcacctttttggctctcgtgactgaaaggatgcatcacccttacccatgcatggcatgggaatctgatttgaacagctgggttctcgtaagctgtcctgattattgttgtttggcccatatcaccacttgttccccagaccgctatcactttaaggtcatgatcctccttgttgattagctggacgagatccactctctgattgtcctgttttgcggcacgccttgcatcatcaatgccgaatatggctgcagcaataacgctagattgctcagctgaggtgatggtggccttggagccggagcccttgatgaggtggtaccgcgcatttctctggctgacatcctcgaccttgttcctgagctccttcatctgcttggccacacggcgccgctcgagcagcgtgcgagggaatcgccaccaggatggcttcttcagatgaacagcaaaatcctggaggctgtcctcaacgtcataggcagtgtcacggacttgcttcacccaagtcttgaccactttgctgttatcttgctcctcgtgcgcctccatcatgaaagacctcatcatctcaagctcatctgcaacaaaggtgtggtctttttggataccaagctgcaaggccacctcctcggcaaatgcagattttgcgtagccaagcgctccattcagcacggatttgcccacactcagcgttgttgcctccattgttctgttgctaaagcatcaaaagcaacaagttttaaaataaaaaagaattatcgagaatttgcgtggctgaagctaaagcaactacttttaagaaagaaaataaatgacgagagtgagggagtcagagtaaagaaaaggacttggtgttgcttcctttgatcctttcagatgaccttcgttttccacctataggctgtagcatacagaaagcgtcgcctgcatcgatgaccactccgttcccggcggcccacctccacctccagcaacctaaggcccttttgccccccccccccccccaacaccaacacacacacacacaaaggaataagtccactatccctccctcaacatggccgtgtatgaataccatccctcaaccacaaaaccaggtataacccgtcccccaactccgaaaaccgttgcaaatcaactccccgggtggttttggaggcggttttgtcctacgtggcatctttgaccctgttgacttgctgagtcagcaggtgggacccacctgtcagtggcaaggataaaagaaaaatggtggggcccactatcaaccacacttctcttcttctctcgctcctccggccgatcccgacggctaggagctcgccgccatcacggtgcctagccaccgcgacgatgctgcggggagaggcttgccggggacaactgtggatgggcagaagcgcggcgagaccgaggccggcatggcggtcgtcccgagaccccgcggcgagcagcgagagtgtgctgagcgccacgaggaggagcagcgccgcccgtaccaccatcatatacgacaacttctccccgccgcgctttcccctcctcctgcacctctgtctgcacatcagcgcacatggattgccggcggcagcccgtggcaatgcggcatagcgtgattcgtgcggccggcctcgggggagacttggtgggggcagcgcgtgcgacggcggtggcaagaccaattgctgcaaaaattccatctccagttacatctacaaacggctccaggaagcaagcagtcagatataaaacaatgcgagatcaatgattatccagcaacaaagctgcagatagccaggtaccccaacaatagtatcaatcagaaaattgccgggtggcataccatgctgaccaaatttactaagctatcgatcagcaatttggtcgactgtattgtgatttttcaagcgtgtatgatactatgatgcctatgatcagcactcaatcactctgcccaagcacgcaaaacactgtcaccagagaatccccaatcgatttgcaaacccatatggcacgcaccagtgtaggcggcgaagccaagggggaaggccgtcgcgcacatggacgcggcggagaagacgggctggcccacctgcaggagaggccgttccacgtcccagggttgccggccagctccctcatctcgtttgccctcctctgctccggatctgaggagggggatggcggcagcggtgaaggcggtagggtggggatgggggcggggaggaggaggcggagcggagcgtggcaccgaggggcgggcgagcaagagcgggggcgcggcctcgacggctggcggcggggtgaggcggcacgtcaccgccgggatcggccggaggagcgagagaagaagagaagtgtggttgacagtgggccccaccgtttttcttttatcattgtcactaacaggtgggtcccacctgctgactcaggaagtcaacaggatcaaagatgccacgtaggacaaaaccacctccaaaaccgcccggggagttgatttgcaacggttttcgaagttgggggatgggttatacccgattttgcggttgagggatgctattcacacacagccatgagttgagggagggaaagtggacttattcccacacaaatgtctctctggcccatcatcatggcccgctccttgccgcgcaccaccgctatagggaggagagcctggcctccagggtcggactctccccttctccatccctcctcgcttcttccccctcttcctcccctcacccctcctatctggagttcgtgcggtggccttgccgtgccccatgcctctttgcttcttcaaatagaatgacatgcaatgtttttgcgcgtacaaaaaaaaaagattccatcgtttctttctctcatgcaaaaccatgcatgtgactttcatatcatacgggtgctaaatgacaaaagaaggaaaattttgtcttcttgttttttacctttctagcgtatgataagaatgaatgctcattggatacacattctccatattatgctctagagagaactcgaacctccatgctcttttagcacgagattttgagtctcacatgtcttccatttcggcatcttaaaaatgaattatattccataaatatgacatcttgaaagggaattgtgttccagctacggcagctagtaaaatacagggaaaataacgcaaggggaaaaggagcaaatgggctggtgttcatccaggcaattggcagtacctgaatctgtgaacaccttcaaatcaggggtggatctataatcttcgcgtctgatgttcacgagtggaacagaccagcagcacgcacaaggcaaatgtgatgcaaaataggagtatgttctgactgtgagtaccaacactaaaattccaataagtcatattaccgactcttaggctttcatcactatctaatgcatcccaaaattagaagctcaaaaacaaacaatctgaaagaaactgctcgaaatgtatgaagtactactacaccttctgtggcctatgactatgagagggtggtcgcagagcccgcaagcttgaggtgagtgacggcggatgcgtgacgccaaggcaccgttgcccgcagctgctcgccgacgaaccacgcctgctccctgaccgccgttgcctctcacactcggtgcctcggtagtcagtgctcaggaagggataaacatagcccatgtgttaaagaaacaatcatcattattgtagggtccaaggacaaagcgcaccaacccattgtactcactcctcccaaaagaatcaattattgaggatgaatttagatatgcatttatccagattcgtctgtaaaagttagatgtttttttatgaagtacaatgcatttaaacgtgctcactttgcactattagtgtaaaaaatatatatatgaaaattatatatgtttgctaattttttaataagtataatcaaacttaaataaagttgtatgtgaaaaaaatcaaaacgtcttataatataaaatgaagggaatactgagctagtaatagtcatttatttttagataatgaaagtttttattaaacttaattaattagtacataaaaatgatacagtacctcagaacacttctaccttgcataactagtaatggccaataattgcaaactgtttcagtgtgttcatttgacagtggtaaagttgtttcagagaattggcatagtgaaaatcaggggatgacctgaacagaaactcacagttggagttggaacggaatcaacaagttcagaagctctcaatggctaatgaacagatttttttttctaagatgcaaaagcactactactataatggagtagtatagtaccttgaaatgggggatgccgatccatggttgaagccctaggatccgcttcccttcgtcctcctccgcctcctcgctcgatatgtcttctgggacaggacatccaatcgacttacaagtgcatgggggcgcctgcctcgggggtggagatagggtttggggtttggagaggacgggagatagggtttggggtttggagaggacgggggaggaggaggagatgtgcggacagtgcgaattcggcgccgtcacggtgttcgacgaaatgcgcgaacgaggcgtaggggacgacggggacgacggggacgacgggagcggagcagaggggatggcgagcccctccaggttgagactatggtcactaccattggtcgcgaacgagcagaatttgcagagaaaaatagtcctacaatccaccgacgaggagtcaatgagctcgccggtgatggcacggcggcggctcactcctcttgcaagccgccggcgatcatatgcactcaacatctcaaaaaatgtactagcactctgtgtatatcttcaccttcacatgaacaatgacagtgaagcatagtacaaattagcttgtacagtactccccctgtcccaaaaaagtccaattctaaggatgaatgtggagggaatactactcataagaagaaaaggtggagtacaacatcaactgggcaatactagtatggatcaaatttcatgcaagtttgacatccttaagaagtcttgcagccatagccccgcatcttctgatttcccagtcgtcgtccaagtagcctgcagttttggcttctgctgaatccactgagccagtacaaggtccaccactctcagctccaggatcttcatcatctcctggattggagacaacctcctcctcctcgttgttgccgttatcgctgacctcagggatcaatgtcgctttggggtccattatgtaaagatgaatactaggatgttggtatttcacatccatctgtgttagaattcaagaacagcgtgatggtagagaataccttttgcactgatgcagaaacagataaatgacaagggaagggagttctgataagatgaactctgaagtgtgtgtaccttcgatttcgagacggttttcacattaaaattgcttttccacatttgcatcatctgttcatggacagtggtagaacggatctcgtatcctagctgggtagaaagcaacaatatttacctcatatattgtcaataacaaaaacagaactgtttgaatggtggtgaaagcaattaccattatttttgttttaggaccagataatgcaatgattgtctccattagaggttgcaacagatgttctgaataaaccttcaaaaacacacagacaaaagagcagtaagccattgcattgtctctggactaccagtgctgttatcaattatttttggctattctgcatttctgctaaaaggctatcctctgcacttaaatttcaatccgtaaggcatgcctataacttacaaaatctagagaagcaagtgctcccgcacgtttgtaacataaccaagaagaaaagtttagtgactttgaggaaaacttcatttaggttaatatctgagagattcctcatgtaaaaattggcaacttattattacagcaagtgaccatgtgcaatgtcgattgctagctacactaaagtctctccagactctgttcttaaagaacaactgaaatatcatgacgcatgaaatttagcatatcagtaagtaggataagctatttgaggcaccaaactcaagctgccagcgcagaaaacttacaacatcagttccaatgatgtaatcgaatggaggatcaacagctcttatatgatctttgttaccccagtccaattctgcaacggtgacagagccgatggagcctgtttgccacgtaaaatcaattgttaggagaactagcaacgtccaattgttatgagaaacttccacaaacttaactaaccactaggcaccacttattgtcgcataagatctatgcatttgcaatgaccattgcgatgaccacatcttaagttcttaactctttcaaactatggctatggcatgtttcatgtataaagacaatggtaatgagtggacattcatttttgtacttagataacagacctgagtcagagtttgactgtgaaatccaagatttgttgcgttcaacattcctcaaaagcagcgggagcacctcaacttggtctgttgtaaccacgtcacaacccagcaaagccattcctggggagaagcgcaattttgttattgggcgagcaccatcaagattcagatagtatctctgaaggtaattcgacccatcttaccaagcccagctagaccacaaccagctcctagctcaatcaccctttttcctttcagtttagatggagaaaatctaccttttctgctattcttttcctggacaggatgggagtaaaaccttaaatgtcaagtgtactgacagtaataggagtataggactcaaagtcccaaacaagtaaagttactgaaatcaaaatctgaaaatcacaccaatgctaggaaataaagcttccaaagtgtaggaactgcgagattctatatatgttggatttgagggagcatcaccgaatagttccagcaatttgcatgattatcacatttatctgcttcaacttgtacaggatagctcagtagtccaaagagaagagattaccaagaacttgacgaacaccatggatgcatcccagaccgtggttccgaggtgcttcgagttaggatcctacaaataatatgcagcaatagaagcaaaaagaaaaatcaggctagcattcagcatcaccactccttcccacatagcattacagaacaagatgaagtgtttgcttctcttacctgagaaatgtgcagccgatggcccagcaactccagcgaaatcgcggacgtgctcggggagttcaaccttcaatcaggaaaatcaccatacatgaaagaagaacatatgttaggccagcatcgccatgtaatcactaatcaataatccgtttgcccaaatctcttgccactaaaaccaaactagatattgaaactgaaaggagggggatggggacttgggggaggaggaagaggttccaacgcggagaaggtttgcttgcctttcgtggtccatggcctccccggaactgcttcgcctgagctccgtcgaacggcggcggcggcggcggcggcgtcggcggcggcgaggaggagtggtgtgtagtgtccggagggagagagatctctctaggtgtaggtgaactgggctctaaatgggccttatccaatccggtatgcccaagcccggcccattacatgagagactcgaacggcccacgcgtattctcgtcgtcgtcgtcgtcgtcggtccacctctctcgcttccgccgccgccgccgccgccgcggcgagccatgggacgccggtcaaagctgcggcgcggcggccgggccatcaccgccataccggggggattcctccacctctccctcctcgcctccctccgccgccgcccctcgctccaggcgcacgcgcagctgctcctcctcggcctcccgctcccggcgccgaccgcctcccgcctcctctgcccgcacctccgctccgggaacccctccgccaccctccgcctcttcctccgcgtcctgcgcgaccgcgaccggcggccgtgtcccgtcgactcccaagaggatgtccccgactcaagctccttctccgccgccctcgccgcctgctcccaccatgcctcgccgtcgcccggattctctatccatgccttcctcctcaagtccggattcgcctccgacgtctttgctgccaattcactcctccacttctatggttccttcggtctccactccctcgcgcgcaacctgttcgatgaaatgccggctagggacaccgtctcgttcaacactctgatcagttcatatgtgcattcctgttgtagtagcgatgcattcgaggtattcaggattatggtggacagcgggttacggccggatgggtggaccgtcacggcgttgattggtgcatgcgctgagctgcaggacttaagggcagcaaaagcagtgcatggggttgccaggaggatgctagagccacgagtgtttcattcaggagaggtggcaaccagtttggtggatgcatatgtgaagtgcagaagcatggagcttgccaggcaggtgtttgatttggcaggggataatgcaaggaatgcgaggttatggacaaccatggtgtcagggtatgcaagagctcaggagtttgacatagctcaaagattatttcatgagatgcctgagaaggatacggtcgcgtggactgctttgataggtggctttgtccgggcagggaggtacaaggaggcagtggtgttgtttgaggagatggaagaggcagggtttgaggcagatgaagccacaatagttacagtgctttcagcttgtgttggttatggtaacatcgatctggcaaagaggcttcattgtcttgtggggcgtgatggtctgattaacagaaatgcaaagcttgctactacttttgtggacatgtatgcaaagcatgggtgcatacagacagctcaggaagtgttttctggtgttgatgatgattttaagacattggagttgttcaatgctatgataaatggacttgctcggtgtaaatttggcgagaaagccattgcactttttgatgaaatggggtcacttgggctccatcctgataagataacgtttgtgtgcgtcttgtctgcatgcagacacagcggcttggtatctcaagggtttcatatatttgattcaatggaggagaagtatggtgtcaaaccagagattgagcactacacttgcatggctgatcttcttgcaagggatggacaacttgacgatgcgtacatttttatccagaacatgcctttcaaagcaaattctgttgtgtggtcatctcttgtgagagcatgtatgctccacggaaatattaagatcagaaagcttgcagaggagcaacttctttggcttgatcccaactacaagcctgaaaatctccccttgtcaaacttattttctgagggaaaaagaaaagagcgaactgcaagggtgagaaagtttctgaaccacaagcctgtgtgtaagcataccaaataatagaacatagctaagactggaatatctgtaagtgctactcatacttcccaccctcagaccaagctgattaatttgatgcttgtcgggcagctgatctttacaggacgcggtatgagtggggataatactgttcaccacatagagatggttgccgtagcatttgggttcgtaagttcagcccctgaatcccctgtctaaccttgggattcatgacaaattttagtaatcatcaatcagtgttcaagaatctgttaaagattttcaacaaagatatatggctgaataacagggcaacctccatgaaatggaaacaagaggcatgcccttgcatggacaatggtgatgcatttgcagatcttgtgaacactggcagtgcgttctctagctgtggtttgccttttgtatacatggtgcacgcggaaactaagtttgtgctcagttcagtaaaaagatccagaagtccccaggttaatctgataacagaagtcatggcttctgaaattactgcacagcagcccagaagaaaaaaaaaggtcgcaggagaattttcagggctatgttcttccgtaagtattctattcacagtttagaagttttgcgagttttgcgagtgccctttctccatggtacctaagatatagtaattctgatgctgaatgtttaaaacccagcaccttgtcatggaaattagttagtagcttattgagatatgaggtcatcaaaatactgtgttctgttgacatgtatctagcctaattgagtttatcaaaaccaacaactcaccattgaatggagattgacagctgacctaactttgtcaagataaatgtctgaacattccacagtgtatgtgtagttgaattgctaaaataaaagcatagaagggagcttacagttgtagttgcaatgacaaactccagacttatctttcaaacccacgctatcagatctcttcttatcatcactttcctccagtactgattcactttttcacactggttttttccagttagattaagcatgagtcactcagtttatttattggaagctcttttcacccataagaatgtcaatgaggtgatggccaaccacagcaaaatctaactgttttgtttgttgctgtagcttttgctcagtataattatataagcatactcttcctgaagaattagagtatcataccaagcttaagcaacctatgagtgagcatgggaaaaatatgccctttccaatcatttaaattatacccattcatagtatcataatgcagttatttcttcgcacatgtgattgtgtgatgagtgcattcagtggcaagaacgttgcaaggctaatgggttaaagacttctgtattcagcgttgacatacactgcaagtgcaatggctgcatcaagaagatcaatgatggtatgaaaaggatcagcctttcagaaggtacatgaacttccataagcatctccttgtgatgttcttgtgtgtagtggtgcatatcttctgcttgcatttcattgatgagttatctaagtttagaccttggtatcacttattcactgatgaaggggtggagtgggctgatctgatgatggataaaagcagaggtggaagtggtcgggactacggatccagagaagctatgctgtctgttgcgtgaagtgacaaagaagcagacagaaaaacgtacagaaagcaccgtatctgaaggcggcactgcaacatctcagcaaaccaaaggcctactagttggccaggtaccaagggactgacttactggcaatttcagtcaaataagccgtttttcatcagaaggatccatgatacggattacggagtactaacatatcaccatttgtcgattcgaacgttattgaaacgtttttgtccaattcacgactgcgattctgaactggatagtatttcagggtcctttatgacttattttctctggagagctcaagtcgagtgacaccaagcgccccgctattggcagaaacatggaggcagcgggaccgtgccttcagagcgatgtgcatacgtttggcatatgtggatggcatctgacattactgggacattagcgatgtatgagctctaatctaagcagactgcatatgcttcaggagttcaggtcatctccgaatacataccgcgtattgattttcctttttctggtgaattttggagcatatgccatgccatccccgatcactggttgtctaggtttttgtgtaggtttatagccaaaaatatattttttagacggagatagtggtacttttgctatagtttgccatacgatgtgctgctaccagcttgaggtgtgtgctgaactttaggtttagtttgaatcagcttttcggtctgactactactttttacaaaaaaaaatctacatagaatttctcttaataaataaataaatacattttttaaaaaaaatgtaataattagtaataaattaacaatgtgttaatggttcttttcattttatgtgccacaaaaagtcccaacggaaatgctgtatcgaactgagttcactgttgcgcacttgcaggcttacttgagccaggcccgttcgaacctgatggatgaagattaattacgtgcaagtaaacgagaaaattattagcaaaattaataaggttttaattattttaaacttgaaaatggatttatcaaatagtttaaagcaattttaatatattaagttttcgtacaaaatacactgtctagtaatttgtaaaatgtagagtagtagtatatagaatgggccatagtactactataatatatattagtactccctcggtccgatagaacgctatgtccatattcgtctctaggattttgttttttattggatagaggaagttactatagtaccaaaattttagtaaaatagtaaaccaaacacttgaacattacctttgttacaaatttggttttacccataaacttatctcttagtagggtgtgtttaattcacgtcaaaattagaagtttgattgaaatgagaacgatgtaatgtaaaagttgaaagtatgtgtgtataaaagttttgatataatggaaaagttggaagtttgaaactaaaccaggcctagtatattttggtttcactttaaatcaacaaatttaattctaccctaccaaagtttagattagatagtgtgaaaagtgaaaactggctctaaatactcgtagtagatagactcgtagaataatacagtactccgtaggccgtagtagtactactacgagtactagtagtagtatctgcatttggaagttgttgattgcacaaatcaactcccagtcagatgaagtctgaatagccgtggcctgtgaagtgaagtaaatagccgtgacctgaggagtgaggaaggaggtaggaaaggggcgaaatgacgaggaaggatgagaggaaggttggtctagccctagcccgtgaaccacgcaacgacttggaacgacgccagcaccaacaccaacaccagcgtcaatgtgcacatggttgcactgctaccataatattggctcttggagcgtcaacgaacgctcacccgtatcttaatgttaactcctccaactgatatgtactctactcgtatatgttcacgcggtgcttaattatagtcaatgcctcgcaagtccctttttgtactgctattcttggcgcggttcgttaaggtgtatttttggcccctctctctgacagagcgaagtctccgtgtaaatcactgcacatgcattgctgatgctctactattgattcctactatcagcatccacatctcaatatattggatcatctacatctatcgtgaaatataatttattctagtattaccaacctactccctccgtctcattttaaatgcaaccatgagtttccgtgttcaactttagtcgtccgtcttatttgaaaattttttataattagtatttttgttgttatgagatgataaaatatgaacagcactttatgtgtgacttatgtgttttaatttttcttaaataaatttcaaataagacggacgatcaaagttgggcacggatattcatgcttgcacttaaaatgagacaaagggagtactacgtacgaatagtaattttgtttaggccctgtttagatctcaccctaaaatttttcaccctgtcacatcgaacgtttgaacacctacatcaagtattaaatataggctaaaaaataactaattatacagattgcgactaatttgcgagattaatcttttaaacctaattgctctatggtttgataatatggtgctacaacaaacatttgctaatgatggattaattaggcttaataaatttgtctcgtagtttactgacggattttgtaattaattttttaagtgcccgaacaccctatgcgatactctatataatacttaatgtggtacgccaaaggatgtgatcggcagtgctcgctgctgcagccgctgcggctgcaagacagcaagagcaaaaaaacgactacagcggcagcagttgaaacacagcagcagccatagcggctgtagtagccagcagttccaatcagcgccaaaactctacatccctggatctagacatccccttgaaatggaattagtaagtggctacctgctgcttgggctgtgtttagatccaaagtttggatccaaacttcagttctatttcatcacatcaacatgtcatacacacgtaacttttcagtcacgtcatctctaattttaaccaaaattcaactttgcgcttacccttagttatggtttggtttcttcgattgcaaggtaatcgagcatgcacgccactgcgcagtctttcagtgaagtgatttgacgcgagctattagtagctgtactgctgctttatgtactctatagagtactacttactgcgttcaaatcctaatttccgtgtccaacgtttaaccgttcattttatttaaaaaaattaaaaagataagtcacgcataaaatattaatcattttttatcatctaataacaataaaaatactaattataaaaaaatttcatataaaacggacagtcaaacgttggcacggaaacccagggtttgccttttttttagacggagggagcagtccatactccatactgccttcggataaaaataagtttatttttcacctattattatacacgtatcaatataaaaatagaaaaaactagaataactctatattatcaaattctaatataactattcatccatttatctatttctaacaaaactatttccaatgaaataaataataggagctaaaaataaacttgggacggatgaagtattatgatctgtttagtagatctttaactcttaaatctagcttcaaaagttgggttcggaatggagttgtggagcaggctaaacctaacttcacctctatagcttattttctaagaaagttcgtcctattttaaaataggaggtaaaattgtttacaagctgtgcagacatatcaatagggtgtgtttagttcccacacaaaaaaattacacactgcatcgtcgtattaaatgcatgctaaaaaataaatagattacgactaatttgcgagatgaattttttgagcctaattgctctatgatttaacatcgtggtactaatgatatattaattagacttaataaatttgtctcgcagtttacatgtggattctataatttttttttggttattagactacgtttaatattttaaatatgtgtagtataccttatctgagacggcaaaaatttttattcctatctgaacacagcctaatcactgagctcgcctagtgtgatggagtcgatctctttcacatcaatcgggttggagcagagagcatcaactccagtttgtcgggcctgccgttgactgacccgttgacacggccacacgcagtctccaacccaacccttgcagatcaaggagccgcgtcgtggcccccgcccaagcccagcttctcccttcccctcctctctataaaaagggctccccgtgtgctaagctagtagtcatctcacatctcatccattctttttctcatcttcttcttgcttccatcgcaacagcagcagagcagctactactagttgatctcacttgagagaaagggatccatccatccatccatcaagatggggaagaagagcaagaacggcggcggaggaggaggcgagaagaaggcgacgacgacggaggtggtgctgacggtggccatgcactgcaaatgcaatggctgcaaggacaagatccgtaatggcgtcaaggaactcgccctcgtcccaggtactacactactccactagcttagctgcctggatcgatcgatcgattgattgattgattgatcgggcggtgaagtgatggtgatgagtgattgattgatacaatgcaggggtggaggcggtggacaagtcggcggtggaaagcaaaggggaggtgaggctggtggtggcggccgcgacggcgaagcccgagaagctcaaggaccgcctccacagggtcaccggcaagaaagtcgacctcctcgtcatcgcgccgcccaagcctgccgccgccgccgacgacgacgacaaggccgccgccgccgaagcggttgccgcgctgatcaggcaggcgcaggcgcaggcgggcgtccacgtcgtcccgggcgcgtgggcgggcggcggcgcggtggcgtacccggcgtggggaatgcagcagccggagggcgggtactactactcgccgtcgacttaccctgcaggcggcttggtctacccctacgcggcggcgtatccacctcccggtcagcagctgctcggcaatggcggcggcgtggtgtcgccatggtacactcatggctactagcttagtagtacattaattcgtagtattagcgatgtttgttttgtaattagtgatacagtacgagctagtacttgtatccagatgagtatcagtagtggatcgagcaggagagtactccagttagtaatggtggttgtcatctatagttaattttggtggggtgatgaggctcatgtgtgtgcacatgtagtggtggttataacaagtgtgttaaatctctgtctcatcggaactgatggtattatacgtagaatcgcgatcgtattcggctggcagttgccaccttccccctgtttgaaatcatcatcatacaatgtgctagtatgctatacgacgaagcaaaaaaggcttttggattcggttcatggggttgcattggcaggcagtgtggcatgtacagtacactggccggagcggaagtagagcccaaaaagttgtttgatttggcctcctctgggaaacaattttaatcacctaggtgtacatccacctattcgttacatatcaactaaattggtataaaatatttaaaaaaatttgacaactaaattggtataaaagtattaaaaaaatttgacaggatagattcatatgtaatatatcaccccccacaaacatacaagttcaaattcaatttttacaagttataacaaaaacaacaaatcaaactctgattagtatacatatattcatagttaaatttgttatttttgttataacttataatagtgaattttaactgtgttacattatatatcattctatcttctatttttttaaaaaaaaaacttataattatttaattgacatgtattaaacaaatggacatccactcgagggattagaagcctatctccaggctcctctctctggtctggctggtttggcccggccagcttctttctacaggagtatcatcatctttgtgttctggctcctgtgttgtgctgcagcagcagcagcaggcaggggaattgaggccagatgaatcaaattgaccatggtggtggttgtggttgggttggtgtctgtcttttgtacttgaggctgatctcgctggtgccaatccgtccgtcgccacgatctcacgcaccgtatgttgccctacgtgctactactagtagttgtagaatcgtgcgtgattcacaacaccagcagcagcagcagcattaatttgttgatgatcgttgcggtgcctttactggagtgagtacgtacggaaggaaggaagggtcggtggggccccggtgtcagtctccacaccccaccactatcatcgtgcctgcatctgcatgtgtgtacgtactacgcgagaggaacggacggctccgatcgattcgcccgcctctcccccgaaaaacgaatcacccacacacgacttgcgtttttgtctctctgctctctgctgctgctgctgggtcccacactcccaccaccaccaccctcgccgcaaaaaggcaaccaaaaccccatcacaattcacaagcctaaacccccccccccccaccccctctctctctcgccgtctcgccgccgcacacaacaccacacctcgccatcggagcagaggtcgaggaggaggcggaggagaagccgccatggcaaaggtaatctcctagctctaccctcccctctccctctcatcgcatcgcgctactcaccatctcagttgcagaagaagaagcgcaccggcggcggcgagcagccgaagcctgcgtccgacgtcgcggaggacaagcccgccgaggacacctcgcccgatgtgcagcagccgcacctcaacgccgccaccaccacggcggcgccggggacggacgacaaggacgcctccaccaaggccgacgaccccaagaaggacgccaaggagaaggagaagaagccggcggcgcttcccgtggtcaccgccgtgctcaatgtcgacatgcactgcgacggctgcgccaaacgcatccgcgcctccatccgccactacccaggtgagctctccctccatccatcatcctctgcttcgactccatctcttctaatcctcctctgctccatctccgtcgatcgaacaggtgtggagggcgtggcgatggaggtggacaagggcaccatgacggtggtcggccgcttcgacgccaagaagctccgcgatcgcgtcgccaacaagaccaagaagaaggtcgacctcctccccaacaacaaaaaggctggagacgacaacgacaacaagaacaacaaggccaacgaatgcgacggcaagccggcggacaagaagcagcagcagcaggaggacgacggcgacgaggcggggaaggaagacaagaagaagaagaaggagaaggaggagcaagacgatcagaagaagaagaaggccaaggacaacaagaaacccgtcgtggtgcgtatgatactaataaccttcccttccgttcatgttcatcgtctaaattcgattctattcgatttgactgaattgttccccgttgttcgcgtgaatttcgttggagtttgtttcgatctgttccagcgaattttctgtgccacctatagtcctactagtaccatattctgccttgcttgcagaattccattgtgtcgtgttgctggttcatgtgttgctgcattctgatatgattctccacaaaaagctagcgtgagatgcagcggggagagagagagagagcgtccgtgtgttgcatgagcctttgctctcctttttcctccctgaaaagaaagaaagaaagctgtagtacgcagcagcagcagcagaatggttgcctgccttgtttgagcttttgccaccatgcaaaggaacagtaaaccacaccctctctacatgccaatgccatgcatgcatctgcatgtctcttccacactacagtacagtacaacccctgcaccatttttctttgtcttcttccttcttcttctctgctgctaccttcctttttcatctcaaagaaaaaaaacacacacagatacagtagatacattgtgtttggatgtttgactgcatctgcattgatctgcaacatgaatttgcacgtaccgtacgccaatgcagccggtgcctgggacggtggtgctcaagatcggcgccgtcggcctccactgcgacggctgcatgaaccgcatccgcaccaagctcttccacatccaaggtaaacaacctctcaattacttgtccatgatttcattattcagtttcagctaattaaactccagtgtgatctctgtgtggttttgcaggagtggagcaggtggccatggagatggccaagaaccaggtgacggtgaccgggaccatggacatcaaggccctgccggagaagctccgcaagaagctgcgccgccccgtcgacgtcgtgccgccgggcaagcagaaggacaaggacggcggcaaggacaaggacaaggagaagcaggacggtggcaaggacggcggcggcggcggcaaggacgcggcggcgaaggcgctgacggcggagaaggaggcgtggaaggcggcgttctacgaccagcaggcgctgctcgccaccgagttcatgctcagcgacgagaaccccaatgcctgctccatcgcctgatctcttttgctggtgattaacaaggcaaagcagtgcgagaaatctaatcagtgttctggtgatctgttggttggtagtgtttttttggtggcaagattaagatcatctttgacatgtgaaagactatttagattagcatctagggaactgaaagagagactgaaagataggaaggagtactagatatgatatgaaaagagaggaattgaatagggagggatgatagacagaaaagagagattcagaaaggaatctgtaactgcagttggccaagctgcttttttcttgggagctaatcgttgaggcattagcaatgctgatgctaagtactctttttttgttactgccacttgttaggagtaccaatgattaacacaaacacactagtgctactagtgtattatctgtttgtcatgtgttatctatgcagtgctgctgattctgcttgtgtgattgtgtgtcactgtggtgttgtgtgtgggctgtgacaaatggaacaagagaaggctgcaacacaacacaactatacacaagagaaagcagcagcgttttctttggctgtctgcactgcacttcactgcagtggagtagaagtaggagtatgtgcaaatttcatatactagagcagtgttggtagtggtccacggaaagcagctgccaccgcttgttttggccttcaccggagaggaaacccaaaacaaaacaaaaccagaaagcgagacctccgacctgctttcttcctgcacaaagtgcagatatgcagcagcagcagcagcctctgctgctctgtggctcagagcaggaggcactcaggcacaggaagctggttgccaatgcctttttccgtttggccctcctcttctcgtctgcatctcggaaaacatgcagagaagggaagtgagaggaaatcatcaggacagggcacgacgttcagggcaattaaactgggagatttcttttttcttcttactagtagatgaaattgtttgatctagacaagtgctcatactccagcacgaaaatccttcaatttgaagttgaaagttttgttagagctagcagtccacttcaaattcaaggtggtagtggtactcctcctagtatcactccctccgtatttcaatgtatgacgctgttgactttttgacaaatgtttgacctttcgtcttattcaaaaaatttatgtaattataattaattttattgtgacttgatttatcatcaaatgttctttaagcatgacataagtatttttatatttgcataaaatttttgaataagacgagttgtcaaacgttggttaaaaagtcaatagcgtcatacattaaaatatggagggagtactttttttacaagaacctaaaaccagacagggaagaaataggaaacacagatcatctgaaagaaaaaaatagagggtacgtggaaacagatttatggtccatgagctgctcgtgtcctctgtgtggttgttgggcttatgttgtgggcctagtgggctgggttagccatatctttttgggccccttatgtatgctcacttctgatccaatcacattccagagtttaacttcccagtatttttattttttcgcttccagcgatggagcaggaagaaatcaactactgtatcaattgaaggagttgtggtatcttcccctctctaataaataaataaataatgtatgtatgtatcttagagtattctttatagtgagatactgtacagtagtagtgtgcgtgtgtgaagaaggtaagtactacatacgtatatataaaaacgtgcgtgtgcgtttatgtatggaaattttttttcgccatctatctatgtaaaaggggttgaagtttaatatattccctcagtcttaaaatataataattttataacgagattagatatagggtatatctatattcgtagtaacgagtctaattatgttactaaattttgggactgaggtaatagtttatttagctccatttgagttttttttcttggatccgctcgtgcgcccatagtgtaatggtttcatttagaagtaattgattgtgagattgtggatgaatggatgggatcgcgaagaagcagcagcgagcagggtttcccaaaccgccggggccggggttaccgcgctctggcggtaagcatggttaccacgcggcaaccgtgaaaaatcgtacgaaaccgtgcaaaatttatcaaaaatctaattttttaaaaaattatttaaatttaaggaggttaccacagtatttctattaccgtaccctcatggtaaagacggtaaccgtgataaccaagcggttaccgacggtaatgtaaaccttggcagctagaggcctgcaagagggagggagaggaggcaggcaaacgagcggcggggggccacgggccatttgcactgcgccatcacatgcgcttgcagcagccactacttgcttaattgcactctcttactggggtcgatccatctgctcattaattactcatcacgctagctagcttctttcattttctgcctagctatatattggatcggagtaaattaaatattttcacgtacgcacggtacggccggcaagccggtaaaccgtttggacctggtcgatcgatctttggagcactgcatttgcatttgcatttgattttgcatgcggcgtagagatgacgaacgagatcgatcgatcagatcagagtgggtgccgtacctacatgcacgcgcgcgaccaattggacagaggcattaattaattattttttattatttatttgtctctttgtggatgcatggcgataccgaatactccctcgttccaatatgtagcaatctaatcctattctatgttcagattcgtagtttgttacatattggaacggaggaagtatataattaaggaagctagctagggagtgcgcggttgatcccaaaaccgatattcatctgcatttaattacatgtgtgtgtgtatagttaggttatgttgtaagtgtgttaattaacagacgatcaatctagattgggattttttttacggagggagtacgctctaatataagatgacatgggtgagctagcgagtggtggatctatgcagtttctaaagacacacaacatacaagtggagggaggggtgcatgagagagatcaagacaaacgaggatccggcctcccttgatatatatgttcatttaaaaaaaatcaagactacaaattataggtaggagaacggcattgtagcacgttggtagaggagctatatggtgttcttagtggtcaaagtttgagtttcctcaactttgattttctcaccattattttcttctctcttaataatctatgctaagtatcctacttttctctttttcaaaaacaaattatgaccatcaacttcttttctcttaataattgatgctaagtttcctacttttctcttttcaaaaacaaattatgggtaacctatatttaggacgaatcataggtaattaatgcatgtcaattagagttgagttgtgttgattgtataggttttctcgccatttcttctctcttaataattgataataattgatgctaagttcctatggatccacgaggatcctatcggtgaatcattggtaatgcatgtaggttagcactatcagagttgagttgtgtcttaataattgctataattaatgcttagttcctatggatccatgcatgaggatcctattgatcaatttctacaatgaaattcttggtcgccgtgtgatagcaagctgctaacttcgaaatccccagcgtttgtgatgatcctgcttgtctaggtaaacatatcttatgaccaagacctccggtcgtcagtagaaataggctaagggtgaattttacaatgatttttttgggtgaattcgtcatatatcaatgacggattcattaagaatttaaagtctagatctgttgtagtacaacgtgagtattttcataggcacgccccagtgttgacataacagacttggatagatatcttcaatccaacaaaggactttggcaatttagcttctcgacaccattttactcgaagctcaaccatataccctctagcaatcatcctagagaccatgtcattcttatgccagttcatccccacctcccatgaactcatctcgacaaccaagtcagtgttttgccggttcgtctctcatctccccctcacatcctttgctccactacttcgctgcgttgccctctaccgagctcaatttaaccaatcgagtcccttttccccgctaccaaccctatccactcctctatcctaacgagcgttcagtgatgccaccatgtcctcgccatcactgctgagaccaattgctacccattgcctacaaccggccagctactccctacccctccaagcctaggcaatccggcctctaatttcctccctcagtggccctccctcccacccatccatccacctctctctcggaaccctaatccaacggtgagtggacacgtcgcacaactaccggttgaaacctgtttgcagggatgacgttgtcgcaaacgttcgcccgttagcatttccgtgtacatgcgcatgcatatatatcatgtatagtgatttactattgacatgattaactgagtgtaccatgggtagtaccgttgagaacagtgagagattaggacagggcgatcgatgatcgagcattgctatataggagtatgacgaaaagatatcacaacgtttggatcgagcgatatccaccacacatagcgtaaggtataacgcaaagacaggtaagtacagtgcatgaattggacagggtccaccttaaactgaagtctgaacctagcgctgttcgatcgtacgtacgagagccctagctgtgaccacatctcatgcatttcatcatgcactagcactgtacgtacactgtcagctagctgctagtagagctacttgaattattaatttctgctgtatatatatacattctttgtccaaaagaaagtcaatttttaacttcaaatttacccccagaagttagttacgtttctttctataacgtagcgtattcctcccttcatattcagatttatggtcatagaatatgtcacatccatctaatatcttttatattttgagcccgaaggagtatctagtagcgaattacgactaattatttatacatttattgtgtcggcatatatggatatataggcatgagtttctcatctcagcacctcagcagccttcatctgaagcagaagcatgcgcatgcatatattgaagtagtaactgatgatctgtacatatgaggagatcgataaatgatcagacactcaaacacacacatgaattaatatacgtcagatgagatatgatcattgcaactttcatcagatttcaatcgatccatgcatgcatatgaattgatcgatcttattagctagctgctgactgaagccctgaagtttcaatcagctgcagggcatgcattgcatagtgcagcatgcatgcatgcagcagcagaagccgctcgcattcaacatctatctgaatgtcgtctgatgatctgaaagctagagagagcatgcattgtcgtcagcaagtcagcaactaattaagctcatcagcagctctagctcgtcgtattgggcgcccacattggcgttattcagttaaatttgcagccttgcagttgcagtactgaagcatgaatgactgcaggccgacatatgtgtacatacacttgcatgctagcctagttgcagctgttacttactgcccggcactgaaatagttactcctcctactgatcctaactccattgcagtagtaaaactcaatcgatacagggctaactacagcaacagcactagttcatgactttcatgtgctagtagtactattaattaatcataccagagtggagtgtacttcttaatcaagaggaggaacatatatgtgtgctagctcacagtaatatgtacgtatactgatctgaaatgcaatatgtagcatcgtactacagatcaattaggactgcaatagctgattaactagtagcaaagtacatacattcgattagatctcctttccaagtactacttagatagtattaattagccaaactttgcagtctagtattaagctatattctcatattccaagtactactacactggtatatactagcatgcattgtatgagatatatccacttactaagttactgaagttcagacatatcttattcctgaacgaacaagctagcaagttaattattaccggctgttatatgagaatagctaatgcaagactcgaatgtgaatcgatttctggcagtgtcaatgtgcagccggccatgagatcatatcgcagatgaattaaaacacaatgcaaaaatattcaagcaaagcatcattgaaaaagaaacgaccgatatcaaattaaagaggcgcaccggccaagcagcatgcagcagcagccttgagggccggagatgcagcaaaaaagcaagaggtaaattaaagtgaaatgaaagggggagaaaattttcacctttgagacagtagtaccaccaccattctctgcaagccttgtctgatgatgaatgatgcgccatggctactctctctctctctctctctctctttctctgcaagtctgcatctgcatacatattggtcccctttcttctgcacaataatagcaaatgtacgacgtacgtaccattggtccacacaatgatcgacttagatcgatcgatatgatgtgatttagacagagatgatccacatcaatgtgtatgcaagaatgcaagaaactgttcttgattcgagaactcatggccaatcgaccatggctgcctgcctgtccctagctagctaccacatcctttgcctctacacagtacacacactacatgagctagatatatagatcaaaagatttactgcctccattctaaaagttgatcgattcatgtaaaaaatttgatttattttgggacaaaaggagttcatttgtaagatcagacatatgcatatatatgttgtctgatccttccagttcatatatatcaaaagagacatgtacacctacttctttcttgaagatggcacagtagtctataccacatctgttactatatgatgatgttttaatttagctttgacatgcatgctcaaagagaagaatggagcaggagaagctgaaagtatgcagtggcaagcaaacatacacatatggagtacttaattgttaactaagctggccttccattaatgaaagcaagaatgttgtttggatatatatatagcccaattcagggtgtatagtggtgtactacatgtgttgctttgatgatgtactacactatataacaacagagaatatatgcagcatatatatatcagttaactggagtggcacagcacatcatatcccaactaatgatgataggaatatttacatcgatcgagcatattatctgcagcgtcaaccagatactagcagccagtgctgtataagaaataaagtatgcatatatctgcatgattgattaaggaatacttgtgtacttaattaatcaactagctaactgagtactgcccagtgtatagtacttataaaagcagctaactggaagaattaattgagcttgcaggtgattagtgaaacataattaaggaacaagagtacgtgtctgaatgggagaggatgaagctagctaactgaaatgtaagtcagtgtgcacgtatacgtgcagatgatagataaagctgatcgatgatgttgagcatctgggacagcttagttagtcaattagtctctaattaatatataccttgaaattaagcttctatatatagaacaagtgtacagatgatgccaagggaactgacgttgagctagctctcctgcatcacgagagagggaagaagagctagctaacttccaatcgaaatgatatttatgtcataaaatcatggtgtacctgaataatcatcatgtttcttggtccattaattcctgcctgtgtaccagaaaagacgaaaccacatgcatactggaagactgggaacattcataggacaagatgaggagagcatgaacaataaattaaattaaccaaacaacgacctaattaaaacaatggtagatcatcaccttgttttgactagctcccaccatgactttattatgagaaaatttaaacgaaaactcaaaaatatattaattcttaaatactccgtaaaggagtagtgctaattgaggattccacatatatatatttgaagaagaaagaaaagaaaatgtgcttagaagaaaggagtttaagctgaaacaattagccaagctcaaatatataggaaggggaaagctagctataggaactgtacctgaagattaatttctagtctccaataatcaaagcaggccatggatcgagacgagtagtcgagcgtttgctgatgcagcatcatcaagattctcatcacatatagtcagccaacctcgatctcgtttagggatgaactcgatgtgaatcttgatggtgctgcacctgcaagcaccgactgtttgctactagctccatatatgcatcgatccatgcctctcatcctcgccaatttgtgccaatttgtgagatcgatgcatatatatggtgcatacactaccagaagaatggatagtatatatggagaatggagctagagggagatcgattaggaaagggattaattcttcctcatctatgaatggataatgagatatagtatggatcaatcatatcaagatcgatcgaagaggatatatatatattatctgtggaaacaacagattaatttggtccctacttaaagtaacaacaagaaaagaaccacatacgccaaacagatatccatgaggaaaagagagagagagaaattaaaagaatcaagaaccagtagcagagactaaacgatccatccgatggatcgccgccgcagctcgccggaccagaaacgaagacctcaccggagatattatctccggatcgatcgatgtatggatggaggaggtggaggaggaagaagaagaataagaggaagaaggtaaggagagattggggttggcatgggtggccacacacctctcacaacatagtgagtgagaaagatgacctcctaggtaggtagcaagctagctatatataagcttagctagctagagccagctagtagctagctacaagaggaggaggatgggggaagcaaaaaccctagctaatagtgatgcatcttgagaagagatggcatagctctagctctagcccccaaataattaaggttttttagcttcttggagctagctatggtagcagctgcatgcttttctctcaagctccatggaaagctagccagatgatgagagtgagagagagagagagagagagagatgatgaggtttagaggcactgaaagggtgattaataagaaattaactagttaatggaaaggaaggagatggaaggaagaggccggccggagcagttgctggttgagctgagaccaagcaattcatcgcggggctagctgctgctgctgctgacatgtaatgccacttttgcttctgattggtccactccatcgttttcacaggtgtacatgacagcgccacccccacgcaattactactaattaattagttaacaactattaatctccgatccatctcttgttcttaactaactttgcaaattcacttgaattgatattttctttctttctttctatgtgcatgttagctgatccttaggcaatacgcgccggctaactcatatatttttttcgagaacggttggatgattaactggcatctctctcttacaatacagacaatctttgatacgaatctacgtggtgacgactcggactagacggtctttttattaaacaaattaatttaatatctctaggtctaattaagtttttggcatgagcagccatgtgagagcatctggccggttggtagaagagccatatcttttacatatgaaacaatttcatgagaaaaaccacaccaacccctggtttggtcatataagaatatggttgggatgttcttaagctaccaacaacataactaatgtatatgtactccaacgaaattaacttagatgtctcaactattttgtagttgtgaattttaatttgttcatggataaataaagtaataaaaaggacaaataatttgctgagcccactaataataaatgagtaataaaactgtacccctacccctggtactgactgtctaattcctcatcacacacactgacttgttgggagggtgccaatgtgcatgggtgggacatactccatagtactagcagtagatgatggtggccaacaatttgcaagggaaaatggctaatgagctagtccatcagtcacaacaggagagactgggacaggcaggggccagtctgtgtctaaagctcaaggcccacccctgaaaaaattttcccactgacgtgatggtgtgacatggagatgtgtgtgtcatactgccaatctgtcatacacacactcacaaagatcataagccattgttttgcccgtaatgagttcagatcatgctaatagctgcatttctcagcaggagacctttggatcttgtttggggagtttttagcggctgcaagcttctccttgaatctcaatctcttctaaagacccaaacggttcagattttaagaacatatgtctataaattatagaaaatgaactagaaatcagtaggtatgagactaagatttttcagatccgcagaaactagctatcaatcatttgttttttaaaggcttatcaaatatgactcttgattaaccaattaatatatcattagtacactagtacagctactaattaatccagctagctcaagctatacactgtgtgtgagagagtgagtgatagagagagagatgagatttggaaaaggtggtgagtggtggagaaaagagagagggggcaactgcaagagcctgctgcatcagcaaggcagctcattgggtggcggcagagcagcctgagctgtttgttcggtggcactgtactgtactgctgccatggccaccatggatggtcccctgaaacaacatgcccctacggtaacactagttacatagtatacactcactagctagctctaagtaaggtcattaagcaatataattgccccttgcaagctagctaaccgctccactctaactaattgttactattgatcaaccatcaatcatgtaatcctaactcctaactcctaaatgtcttgtttatcgagcgggagattctaatatgtaagtagtcagctgatcagaataaaaaagttgggcttcccagtttctaacttctactttattttgtagattttattgctactgattctcataatctaaatgaaaatctagttgctagaaattgtagagttatcattttttagaccgtttgtagagttgaagattttaggaagaattgtagttgccataagcttccttaaacatgactaagtttctaaccaatggatcaatgattaatttcttctcaaacttcttctaatgttaattaggatttcttcaggaacttctatacattctaaacttacatgctgcccaaagtaatttcatcagaattctttatgccttcggcatggactgtggaaattcatgagctcgaatctcgatgtaggcagtacacagctggctgtcgactcagtatggactggtgtaattaactagtgttattagtagattaagcatgatacttagggttaaataaaacatgcactagtatctgcgtgcgtatctgttattttgttagtaagcaacgctcctggtttctgccattgatgtcggcatccacctcacactccttaagtcaactcatcttcctgctctgtcagttcagaaaaaaaagaatttaaacattaatcatgtgtatataactgttataaagtctaccattgcatctacttagtactaacctaactacttcttccacgaaccattgaccactgaaacttgtcatttttaatggagatattacacagtaagtgtgtttaatttgcaggcagttttagctgtaattttgtgttctgagataaatatgagacaaggatctatatatgtttttttttcatgaataatgttactcattcagtaggacagctagctgaaagtttagaattgatggtgtgatcagaaacaaggcctatgcatgcatgctaacgattaatatgatcaagaatctatagtttctgaactcatcattatcaaatgagccatctttatccactaaaaaatgtttattaaaagtcacctgaataaggttacctcgaaataatgtaaagtgaactagctaccttgaacagtctttaaattttctccaccttaatttcccctcaaattaaaaagagagaactcctactttaatagttgcaggtttggcggtgtactagctactacagtgcatatggatgacataaaaagttaattaacttaatactctcatacaaggatagatgcagagattggacatcaaacatgcatagattaattaattatgcaaagggcatgtacggatcgaatacgatttgattttttgcaggttattggtcgattgtgagtgcagtgatgagattagtttaatcatccacgacgaaaaatataaatatagcatctgatgtacctcccctcccgaaagattcctggtctcgatctcaggcaggttgtttctacaaaatgttttttttttgttattagtattcattgagtttctaaaaaaaatactgatcgaaatcatcctatatgtaagtatatatgtgcagcaagcagttaagaaaaaatagattctctcaccttggagaggtatataagtataactccccatatttgagatatacctcgatctccataaaaggagataccaaaaattactcttataggttagtatatgggttgaaacctatctttataaatatttgaaatagaaggtaccaaaattcagtttacattacaatttttagaggtatgatatttgtgctaattaagaggtatatgtgcctccaccctagaggtatatatctccgaactaacactataaagtatatatatacctacctcacatgcaacgactagaaaggtcttaccggtgctaatcataaacttgttttctattcagttaaactgtctattttttacctattaaattgtgaggaggtatatacctctctaaagatgggagaaattatctcaaagtcgagccaggatagaatttctttgaagtaagaagattgaaatttataaaaaccatgcatgttttatagacaatgttgtggaactacagtactcgttatagtttgtggcaaattaataactcaattatcatggtttcaaggtttcacaaaaatgaaaaatccgttaaactccaaacaatgtaatataacacttatttactttagagtaaattttataaaaccccacctattatggtctaaattgtacaaaaccacatggattttagcaagtgtcacataaccccatctattatagtcctaaagtttcacaaaaccacactattgatcattttgaatttgacacaccacacttttgagttctatagtcacatctcaaatttatgaggattttatccatcatataaatgttacatgtgttttttttattttactataggagtatgtaaaaatggttaatggtgcggttttgtgaaactttaggatcatatataatacccgagattatgtaccacgtgccaaaatcattgtggttttgtgcaacttaaaccataatagatggaattttatgaaatttactcttttttattttatctaagtgtcgttaaattaattgcatgatcaagttgataaattaaattagttaatgttcaaacaacattattatataaaagatgatgaatttaagtcagattttactagaagtggggtcttatgaaatcttatcccaaatgctacaactcaaaataccatatttcgaaaatttcaaccaaataacttaaggctttttttctaaaacttactccagtaaatttaatataactaaagtgcaatgtgtgcatatatactactacatccgtttcaggttataagactttctagcattgcccatattcatatagatgttaatgaatctaggcatacatatatgtctagatatatattaatgtgagcaatactgaaaagttttataatataaaatggaggaagtagtaaactcccatttatgtatttcataaaagtacggctgatcgtttggcctatgaccgataagtcgtaaaatgacatgcaagaaaaaaatatacgtaaattttatatttatttgaaaattcatctttttttggcagcggcttattattgtgcgggtggtagcagataattaaccatacataagctacgtacgaatagtcaataagactagctagctggatatatagctccaaattaataaggtatacttgattgcgctggaagatgcataggtacttgattcctggttagctagcatacatacattaattaagaaccttttcttttggaattgcctccaagactagtacacatgcatatatattatatatatatatatatatatatatatatgtttatgttatcctaatggaaagcaatgggagagctccacctgaaaggtaagcttgcattctgaaaatgcagagattcttcctccaaacatagtcaattggctggctggggacacatcacatagacaaggaataaaggagccatgtaatttagctagctcaagctatagcttttgttggcaagttaattaaaattaacaacaaatgaaagcaagttcctaagcatgcaacaaacgaaaataattaatggtacctcccgttcaaagaaaaagagtaacctcgggccctttcgtggtgcacacttcatcatgcatcgatttttcttttgagcaccaataattcgacatggaaattaaatacccaacagaaaaaaataaatgcaattacaatttatactttactcgtgtgtaaaacttcaagctaaaaaaaatcaaggaaacactacgtacataaatcaaggtactatatatccgtaggacatttatcactcgtttttaatttgatttgtataacaaaattttgattttacacctaattaataaaagaactctagaacacaatatatattattgcatcttcagacattatcttaataagatcaatcatcttcatcttcatttttccctcatccccatgctaacatgaaagttgattgcatgattgcaaacacacacactcattgcataataacataatcctatgttacctttcaagaaaaaggcaaaacatgagtagcaaagttaggacaccatcacacacgcaaccgacaaaaatgcatggttttagttagttgcaccaaaaagcaaggattgattactaaattaattggccattgttgcgagtagaaaggttgaaaagaaaaaactacaattaaagaaaactaccttaaaagttgcaaagtttaagcccctggattctgtggagttgtgtgatgagtccaaaagaattgtaatcctcgattccaacgcccacgggaatcaccatacatacagctcgatcgatcgatctccatccatagtgatttgatttaagtatactatatgattgtttgtttatttcaaggcaaaaagaaaggacagctagcctacctagtacgaggaggaagaaggaaacctcccaagagagcttaacctatcatgtggctggcttctgccctactactgtactacgttgtacgagtaatacattagcatgatcactttgcatctctatttgtgagctagctacaatacccacaaatggtaaaacctaggagaacatcttagcatcggactaaccatttctaggatgagtattctctccaatcagaacgtgtcttggtgattagtttctacgaatggttttacgggcttttaaattaaagttttcttagccaagttgaaaaggctataagaaggcaacaataacatgtgagacggtgtaccgccaaaaggagtgacgtggatcagtaatagtgcttgacataaattgtttgaaaattacagatctaatcgtacaagatattatagatgacaataacacgtgaccagtgtgatggcactactacagagatatcaatgctttgtaacagaaatatgtacgaacggcgaatatttggtgagatacctgctagttggatctaggtgtgtagttaacacttaataggtacactaacacttttcttaggagccactttagctcttgctcaaagagatattaaaagaagcttagcctattctacaatgtctcaattacaagttgcgtgacctttccggtcaatatccacagctggcatatcttatcctcttcataggttgaatagtctacgtgactagccaccatttaatcatacaagaggtttattttttttgagtgccgaatccaaaccgtgagcaagcctgctatgtggtcgcagatgttttgacaaaacaaaaaagttagcaagctaataagtggctagctcacttatagattcataattttaatggagagtgcaaaactatgttaaaagtggtctactacgttcgagagatgtatggctatgaaaattaatcatttttgtgatggaagcaaaggtgagttgagtcagtgatggatggatgggtggtggtgggtcccgggtgcctgtgatgtgggcaacaacctagtaccgatcccattgagcccaatgcaagtgggcccccaccacccagactttcacgagctatagtcacagtcttcgtctacctctgctgatcagcttgctgctccaatcaaaccgcccaaccaatctcttgctccattgctgctgctgttcttgcagatgttgctttgctactagtatgaagtatctctgttcagagttcaggctagtagtgacaaagaattaaggcagctgcctgaatctgaatatatatattgatttatcgtctgaactaatgttcgtgacgacgatggcgtacaattaatggcaattgattaattaattaatccatgttgcgaaaaatgaagaactggtcctgcatagtaaatgatctgtagctcatagttttcattggtgtacatgtaatcgatcgcacactcctattcctagctaattcatgtcggatcgatcgttcgatcatttcactgatcaccaatggcgatcgacatggatagtacaagtgctgtattttacactgttcgatcttagggagaaaataaaaagggacaaagacatgtgcaatattattgtacgtatatgtacgcatggatgtgatgttagatttgttctatgtttcatggatgatgcagtgacagttgatatgcacatttatatgtttcatggagtatgttctattttttgcatgttcttctgttgttgtttttgtgtatgcgtttacgaaagaactatagtaatacatatcacttagatactatccttctataataattgagacaacaagagctcttaaccattaatacattaaaataatatttttattacttttattttcttttcttcactcctactatacaataaaatttctttaataaatactaggagttactttgagccggtgtgtagcaatgatgtttctttttttctccatcaccaaatttacttacttacatagtaacatatagagcttgtaaatcaataaacaatgtgggacatgtctctttggtgtgtgactccatcgtttgattgatagtggggtggggtaaatttattgtcaactactataaacttagagcaagttttatagtggaggtgaatatcacctctaatttaaaacatatcatctactcattaattaagaggtgacaagtataacatatcgcatctaactcaaaaatttcaatattagttcactctcacaccactttacacttttcttaaagattaagcgaaggttgctccttgaatgaggggtgactgattttctctcctatattttatcacctaattctatatatatgataaatttagaggtaacgtgtagaggtttatagtgcttgctcttagttcttcagtttgctttttgtgtgattggttgaggactagtttttgtacgcatgtcggcatgtgtaaccgtgtgtgactggatcgattgcgggtacatgggtaaattaattgccaactactataaaattagttgaattgtacgttttgtatacctgggtaacggccatacattttgatccagctgctagccacatcataccaattaattacatgtttggtggatccaatgttgactattcaaacttgatactgtgagtaatgtgacctgtacttggtacctaattagccttaaagatttattattgtcagtatatatatgacaacgaccaatggtacccaaaatgtggtagcaaacgacaatagtacaatattattagtgttaatccataaacattctatccttttccaagttttttcaaggacctcggtgcaatttctttatctttcctgggttgcacttataaacctaggagtagtagtgcagtcgagatcctagtacttcatccattccaatttaatcatcacccatgcatatcggtagaaatcaataatacatctatcctttttcttaatatgctaaatcaattgttcttttttctttgtgggggctaaatcaattgttcaatttgattgctaaatcaaaatcgattttgctatacatgtgtcaccacattttatcattggaattggttgaatttttggtcggtttatccgcattgagatttgttcctggatctccacgtcttgactactaccacggagtagcttttgctccctatctagttccacatataaaagggcttgttcagataattcccataaaaaaatcgagaaaattaggaccatatataatccactccaaatcagcttgattgatggattatcccaaacaagaccttataagtaaccttccgatcccttcttcgtggtaaccaaaggactttctagctattttcacattatttttcgttgaagttacatcctataaacaattgtaactttttggtcaactgtagtttttcttttcaatatatgtaacttttgttttaattattcaatgcaaaggtactccgtattgtttttagtcatttttacagtcttttttttattgaagttgcatactatataagattgtagcttttgttgtttcagtgtttttagtcatttctacagtctctttgtattgaagttacatactaccccctccgtcatattttaaatataatgcaaccataattttccgtgcctaactttgattgtccattttatttgaaatttttttataatagtatttttattgttatgagatgataaaacatgaataggactttatgcgtgacttatgtttcaaaaaaattcaaatcattttcaaataagactgacgatcaaaattgtacatggaaaatcatggctgcacttaaaatgggatggatggagtatataagattgtagcatatgtatgatctgatatttttttagtgttgtcaaagttgctagttatttgttagcgatctttttgagagagaaaatatatatcaactaatatatactccttcataaaaaagttaagcttattttattttctggttttttaaatgagatatacatatttataatcactagtcccggccaagcatctaagacttgaaaaaatggcttgtcttttagttttgtagtgctaaattaaattgttgaccgaaacctaagctggcatttaatactaattgatttcttgtatgcatatagttacttggtttttgttacatgtaggatgagttaatttctccttggttttgataatctctactattataaaaattaaagatgtttccgcggtccatcatccgtgtttgagttggttataaaaattgaaaatgtttccgcggttcgtaatccgtgtttgagtcagttttaattttatgttttggttttaatctatatctcttctctatctctactattataaaaattgaagatgtttggtacgtcatccatgtatgagtcggtttttaagttcgtttgcttttacatatctgtatttgagtcaatttttaagatcgtttacttttggtaatacagaaggaatcatataagaaatatgtttaaaaaactcacatgctaacttgagacgatcagactcctaactgcatctcatgattttctgaaaatatatatatccaagcgaactcccacaatgaatttcatcttaactaaaccatataacaataataagattaaaatagacttcacccgttgcaacgcacgtccatttttttctagtaaaagaaaaaaaaagagatctcccttagcctgtgttgtttaggcccaataaatattggcccagttggtgtcgcactccgtatgaaagcccacataagattcggcccattaaggctcaatagggagtaaaaggggaggcaaaggttgaagaagaagtgaggccggagagctcggagaagggcccgacgaagcgcaggtggggatcacctcgccggcgatggcgcggaggaggggaagcgcggcggcggccgcggcctcgccggccgtggtcggggcggtctccgtgttggcccttgtgtactactccacggtgttcgtcttcctggaccactggctcggcctcggcaacgcggccggcgccgcccacgccgccgccttctccctcgtcgtcgccgcgtgcttcttctccttcttctgcgccgcggccgctgacccgggctccgtgcccgcctccttcgcccccgacgccgaggacccgcagcggcaggtctgagatgagatctatcttcttttaccgcttccttggattttaggattcttgtgttagactgtagcggcattcccaaccataagctaagctaacgtagattttttttccactccaaattatccaatcttatttggaatccatctaaccgtttagtttcttgattccatcatcacacaatgcttagttaggacttcgatgcatcggttggtagtttggagcattccaaaattttagttaccaaagcagttgatttgcaaccactgggatgctgcgagaatacccttcatggtagccttttttttttcttttgtttctgcagggattaaaatcgaggtattgcgataaatgctgcatgtacaaaccttctcgaactcaccattgcaaggtgtgcaaaaggtgtgttcttaaaatggtaagtgtggctaatgtttgtcggtataggttctgttggttgcaaaatgaagcttttgttagaaatacttggtaacaagttttaattataattgcaggaccatcactgtgtctggattaacaactgcgtgggctatgcaaactacaaatcatttatcatctgtgttctaaatgcaaccatcgggtctctttactcatttgtaagtgatatcagttggaataaaatttgggaaattcttcgccaagcatcattcacggtcattccatttttctccaggtggtatttctatttgatctcttccagacagaacatgaatacgatgttccttatgtgaaggtcatacatgtaagtgcactggcctttcttctgaattaatatttcactatacagtcaggaattctccaccctgctactgcgctgcataaataatgagtatatgtttactcttatttttagttatcaaccattactaacctttggcacacagcacactacattgtttttcccactgtgttgtcttaagagtcaataagaaattttttgaggaatccctgtttgttgtatcatgccagaagtagatagtttgttttagatctcttatgagttttgagtttggatttcaactcaattgaaagtgcttattatgtatttactgcagaaacatcaaagacatgatagatgggaataatccaaaattgcagataaaactcatggaataataatgaaaactgtgggttttcctttctgctggtctaacaagggagtttatagttaaaataatgattttgaattttaaaagatggaattcttggagaccttgcaataacgtggtggaatatttggctagaacgaaacagaaggattttctgtcactcttcacaaaacgagaaccaggtggcctccttaatcaaggaaaatataagccaaattaatttgtccagatgttaaatgttgttgttctttaagttgcttgtatcctgaggtttttgcctagttgacaagcctctccgttcgaccgctagacggtctctgcgtttctgtttatgtattctgaccttttattccctctaatatattcggcaagtcttttgccgcttttcgtttcaattttttttttttaaaaaagatggagtttcatgtatcgagtggtgtcactgagatattgtggataaacatgtcacgcagatatgcatttgctctcggttttagttttgtggtacttttccccccccaattttcctttgttccttcctataagaatcatgattctctcatcaaaatcctgtcatgcacttactcggtaatgtatttttttttgggtatagttcccccttttttctggtctaactactaacaaatgactaacgaatgaagaaatgcaggtcttggtcggtgttcttttgttcttcttaagcttgacaataggttctctgttatgctggcacatatatctcttatgtcataacatgacaacaatagaggtaaattactctttggacaaacacatttttttcttggtgggtttatgccatgtttgatttttactgtcacctttacttcagtaccgagaggcaactagagcgaaatggcttgcacagaagagtggacagaagtatcggcaccgctttgatcttggcacacgaaagaatattcaaatggtacgaaatcacgaatagtgcataagatcagatcttccttctccatcatcattcatgataactgctacactttcaagaacttcaacactgaagattctttatgttcaattttattccgttgtcactccatttagctgatacttttgggtccttttgtaacagatcatgggcccaaacatcctgtgctggctttgccctactgcaacggggcatctcaaggatggcactgagttccagatcacaaacaactgatcggatcaacaaggaagcaattgctgcacacgtacatacttcatacatacattgtagatttgcgagtttatttggcgaccaaagttcttggccgttccatttgcttgttgcagtagagagctccacatttgtcaccagaatctttgtatgacagcatgtgaaatgttccatttccctcctaatctccatgtattctcttgcttcaatttatttgtgtgcagagctgtagatagatcaagtgatttgagttttgagcattgtgtactgacatattgaacggcaaaactatcaatttgaccagaattttcatgtcaatttcgcttattcggggaataaacgaaacgacatatttgcaaacgaaatacaatttgtgaataaaatttttatatatgtgttcttagcgatttaaaagtaaatgctgaaaaataaacttcgatgaaaaaactctaaaaacaactttaaatttaaagttgaaaatttaaattttggctgataatcataagccgaaagaggaggccgttgatttggaaatggttcagtacactctctcggttttgcgtctctctggtggttgggccccacctgcagtgtcacgtgtccgccacaaagaacacaaacctgacgacttggtgtcagctagtattgcagacggcttccttcttcggttcttcctgccgccgccgccgcctctcgccgtcgccggcggcttctacctctcgtttgcccttctggtgcgcccgatctcttgcatagcctacgacaatggccacctccgcctacgcagccaccgtcgccggggaagcagcggcggcggcggcgtcgccgtcccgtcgtgtccttgccggtggccgacctcctccgccctgcatctccttcctctccaaatcgccgtcctggtgcgcctcgatctctctccctccagggccccgccgcgccgccgccgcggccgaggagagggtggaggaggaggagccgacctgggtggagctggagccgatcggcagcgagcagcagctggagcgtgccctcgcggaggcgcagcagctcggcctccccatcgtccttctctggtaatactaataccctcctctctttgattgtgatgagcagtaaattttgtttcatttgataaatgcatcgttgtagcaacaccaatcctggatcttggatgacatggttactgggtagtagtactactagtactatcctgcaagttcagtttgtttttttggatggaaattggtcagtttagagttgaatttggtagtgttctgaatgaaattcaggggctcgattaggtgattgttcattcggtgcatctgaccttattaggtgaagtgggctagatcatcatcttgcttgaaatgattgtttcgcctttcattcattaaagagttgcttttggttaactaaaatacatatggatatatgattttgtgtgcatgtgttctttatttgatcgacctttttcatgttggtggcgtctagttactttaaccttgaaggaaagcttcatcatcttttttttttccatattgtgttaaaagagttaaatgaatcttttttatccatttaaacaattggctgcttatgtatattaagatatctgagattgtggacaaaatgataaattaagtaccggtgtcacattgtttttcacatagcactcttcagtcttgcaccaggataatgcttagcttttgcaatttgtaggatggcaagctggtgcaggaagtgtatatatttgaagcctaaactagagaatttggcagcagaatgctatccaaggttagggattattttccagtaaagtaggcaccgctggagctcgccaaattgatgatctctgtcagtacttgtgttatgcagaattcggttctactgtgtcgatgtcaatgctgttcctcaaaagcttgtcaatcgtgcaggagtaacagtaagtctagccatgcttaatcattggtcattcaatgtttgttttatccttagtaaacaatgaacagaaatcattcttcctctcaccgtaattgtgcttcatagttcttaaaggtattctaaggcacttttagacatttcatttaaaaagaagtgctatttgtagaagtttttagagatcctttattgtgcttctttccctgttttagaggaaatagcttcctcttgagcccctggaaactttgttgctagttgccggctttctgcaatttgtatctaagtttttgttagctctatcctttagctttggtaacagagtaccatatcaatgatggacccttcatttatttggcctcgttgctatcttgtcgtgcaacaatattcattaggcaacttgttggaccccaagtatatattaatctacacatctaatgccttcttttgtccaatatatgtgatctgttacgcggaactcgtgcagaagatgccttcaatacaggtacaagcttttgtttgtttctctatgtattgacattgtatatccttaagatggtttttttttgggtcatgtacagctgtggagtgactctcaaaaacaggctgaggtgattggtggacacaaatcctggctagtaattgacgatgttcggaggatgatcgatcaggaggaatgatccattatgtcctttagtgcaaatgatgatgtgatgatgtccaacaggaagaatctttcagtatagcaaatggagaaatcagaaatcaaaagccagtatgaactcctttcaagagatcgagccatatatttaagtatcgaatcgacgaaattactacctctacagtcaaataggcactactacacaaggcagcatttcaatcgtgttctctccaaatttggggtcgacagaatttcacaacctgtggctgcattcctgtggtgtccttgatgtatccatgtgtcttgtttggaaatctatgcaattaaaggcaaagacttcttgctcatgtactgtcacagtacgggcaagcatttaaattagtcattagatgacaataatatttagtcaatgagccttcagagggcatgttgaaagtgttatggttccaaatccatatgctgcacaactgtgattgacttgaactactagtactacaaaagatagctacagtgtcagccttttgcaaagcaggtgttgctagttttgttcagaatagaaaaacaagcatgtatgtatatgttcctgctgaacaaagtatagttatccttaaagttaattgggattagtggaagcaagttccctcttataagctcaactagttgcccacatgcttcagcattgggtactgggggactaatactactttttttcaaccacaaacaacatgaaatgcttttgttttcgtatattaaaacgatttcttaatttgatcgcaacctcagcactttcttgtgtctggcactttaaaaaacacggcaaaagcactatctttacaccttctgcttctgcagtttagagaaagaaaacacacaaatcccagactgaaggacttgttaatctctctttttttttctccacttaatctgctggtttgactagacaatcaatagtagtcaatgaaaacaaactctttgtgattggatagtggccagggcatatagaatagagggcccacatgtcagtcaccgcaagagagagtgaggatgatcaccacagtttcgtgaaagaagatcagaatcagatcagccatggtggtataaccgtccttcctgaaaccatgcaacgcatgagaccggagaaaaataacaaacttgagagatgtcaggttgttagggttgggaattcaggtcagatattcagaattcagcaactgcatttgtcagtcaaacactgaggcatatgaacctgatctcgaaaagaggaaggaaaaaaaggcttctctttttttttttcaagttgaggtcctgttatcctccaataagtgtaacaacagataaatgcatatgtttttaatttagtttccaactttataatattcaaatcgctcatttttaccctaaaatagttattgccacaaaccatctaccaattcaggcacaaaagaggaaggaaggaagaaaaaaggaaaaaaaaaagatctcctcctgagctgttcgttgtcgccgccggtgtgaaccgaccttgtgtttgtttgtgcatgctaaagctaggtcatataatcttatcatgccactcctacacacggtgcattgagattcgtgcgggggtgggatcggacggtggggagtggtccaagaggagagaaaagaagaagcaaacgcgtcgctttcagctgtgggggcgtcgtcttctcccttctctcgcgtctcgcgtctcgacctcctttcccattcgctaatccttcctcctcctcctcctccgcagtagcagcagccgcctccagaaattccccaatccccaaaccctaaataaatcacccccacccccacctcctcccccgtacacgaatccaacccaatccgatacgatacgattcaatccctcccaggagacgctgctctttctggatgtcgattccgtaggggggagtctctctggtgttcctcctcatcaaggtgaggtttgtttttttgttattattattgctgttcgatcgaatcgttggtagatgaggagggaggcggaggggattctggcgatggtttgtttgttgttttgtgtgatgattcctttagtctggggcataggaaaatgttttggttgttttccttccaccccgtggggattgggtgcgattctttcccggtgtttcaatctgagttgtgactggattcgtctcaaagtttgggtttttcttttttgtttgcctgttttcttcgtgctcccgcaacttgatgctggagtctccttaaaggtgggactttggggggttttttttccgactctgctgagggagaagaattcgtaggaagaaactggtggaatttgtttctttgttctttattactaggttgcagttctgtgaaaggaaggtgtctctgatcgttctttttatgtactagttatctaaacaaaaacttcagatttctccctagattaccatacatatttagtatcaatcagtatatatatatgaatatatgagtcatatattggtgttggtttaggttttgcgaggagaagaaggcgagaaagaaagaagtaggttgtgacgaaggaaaccgcagaagccgcagccatggcgccatctcctgcggcagcggctggccccactttcgaggaccttgagcgcgacctgcaggcagtattgatggaccagaaccactcggcaaccgccgatgagctcagcatgttccgcagtggcagtgctcctcccactgttcagggtgctcgcactgccgttggttccctcttctctgctgcgcctgttcacgtcgacagctttgttgatcccagcaatggtggtgttggtgatgtgctctctgacgaggagataaggtctcacccagcctacctgtcgtactactattccaatgagcacctcaatccaaggttgccaccaccaatggtgtcgaaggaggattggcgtgtcgctcagcgagtacaggctgtttcaggaggggtaggggataggaggaggaggccctcggatgtggggggtggaagctcgctgttttcggtgcagccgggggcacggcatggtaatggagaggatttactggtgaatgataggatgggcggaggagaaagaaacgggctcacgcgtcagcaatcatcagagtggcttgggagtggtgcagatgggctcattgggctatcggattccagtggtcttgggtcccgtcgcaagagctttgctgatgccttgcaggtcaggaaaatctcctcgaattgattttttatcttttcttaaatcaccgtatatttaaacctcgactagaacatatgctctattctatttttcatgaatctccatgagtacaaacagacagctattgctaaattgatttatggtatacctatcatgttgtgttctttagatcactcagacagctctcatttatgtttggtaaccttgggaatgagaaccaccatagatatgcctatacctgaattgcattcatgacatgttgattgtatttttcactcgataattcagtgtggaacttctttcagagatactgttatgccactactacagtgcatcaccattctcctattgcagcatagttttctgtcacattgtttttcttatcatttggaatgttttttcatgacaggaaaatattagtcgtcctgcttctgcggccagtcatctttcacggtctaatagccggaatgctttcgacagcccaaatccaattagacctgattcatcaagagcgcaactgcagagcagatcagaatccatgaatggcttgcgatctggatccacttcacccagtcttgtcagggtccaaagtttaggttcttcaatctctcataactttgcttctgcagtaggctcctctatctcaagaagcaccacccctgacccccagttgattcggaggactccaagtccttgccttcctccagttggagttaggatgggaagtactgataagaaggttgatggctcggctgttgcttcacataatcatgatactgctgacattgcggcggctctatcttctatgaacctttctggtagcaagatggccagtttagaagctgaagttcaaaatcgtgcataccagaactttggtgatcaaacagatgtactctttagcgttccaaaggagcgcagacaattatctcagcagaagttagctcaaaatgctgatgaagaatcgataaatgccttggaatatgcagcttttccaaatggtagcggtaacttcaataattcaaatatgagcaagctgtcagttgatagcaggagcaagtttcctatacaatcaccgcatggtaatgccaataataaaggatctcttgtgagccccactggatctgtgtctctctaccagaaccttaatggtgataactccaacattgatgtatctgtacggaataataagatccgttcaagtagctttggttcatccatgctgaacaatcaactgagtgctggtacctctctcttttctttttctccaatctatcccctcctattattgtttgagttttgacccttttttttcctgtgcagatggtgaatatgttaatcttctttcgaatcaagggggatctggttttcagggccaaccaatggagtcaatgtatgctccatacttgcaggcaaactctgactctccccttggtgcagccacaaatttgaatccattccaaggaagcagcttttctggttcagtgcccctagatagccctggataccaaaaagcttatattgcctcattactcgctcagcagaagctacagtatggcgtgccatacctgggcaagtctggtagtcttagcccgaatatttatggcagtgaccctgcatttggcattgggggaatggcatatttatcgagtccaacatctaccccttttatctcatctcctcagggccatgttaggcaaggagataggctagctcgtatctcatctgtgggtaagaccactactggagggcctatgggatcttggaattcagataatggtctaattgataatggttatggatcttctctgctggaggaatttaagaccaacaaaaccagatcttttgagctgttagatattgtaggtcatgtggtcgagttcaggtaattttctcatagtatatccatcagagtaaagttgctgttttcagatatgatgcttgatacacccaaacctcctgttgcagctcggaccagtatggaagtcgctttatacaacagaaactagaaacggcttctgctgaagagaaggacaccatttttccagagattcttcctcaagcacgaactctgatgactgatgtttttggaaactatgttatacagaaagtgagcagccctactattccatcagtattcggaaaaaaatgatgtttttttagtgatatgtaaaaatgttatcatttactggttctctctaattacttgtgcttggcagttctttgaatatgggactgaaccacagaagaaacaactggctagcttactcaagggctatgtattgcagctgtctcttcaaatgtatggttgccgggtgattcagaaggtatgtgtattgtcccctcatattatcactagaaatgagttgaaagaccgactctgttcagttagcaacaccttttatctctgaagagactcagatgcacactattctgctgtaggctttagaaatggttgaggtggaacaacaaacccaaatggctttggagcttgatggaaatattatgaaatgtgtccgtgatcagaatggcaaccatgtaatccagaaatgcatagaatgcatccctcaagaaaggatacggttcattatatctgccttttatggacacgtggttgagctttccactcatccatatggttgccgtgttattcaggtgctatgctaatgtatatctagttttgcttgaaatattacttttgcaacttgctaaatgtacttgcctgtaatttgataccaccagcgtgtcttggagcactgtaacgatgaaaatacgcagagcaccatgatggaagagatcatgcagtctgtggttctgttgacactagaccagtatggcaattatgttatccaggtaactgcctattgattttatgttatctgtcgaaacttcaatttcacctgtacttgtttaagcattgggacgtatttcctatgttaagacttctcatctgccaaattgggcagatacgctccatgtgatgtactttctcttgttttcgtttataccattggagttactttacttttgtgtcccatttattcaaagagcttccttgtttatatttgtagcatgtcttgcaacacgggaaaccagatgaacgttctgctattattaagcaactggctgggcagattgtgaagatgagccaacagaaatttgcttccaatgttgttgagaagtgcctttccttcggtagtcctgaggagcgccagattctaattaatgaaatgcttggcacaactgacgagaatgagccattacaggtatgttttgatccagttacgtaagtgtatcgtttccgttcgtagaattttcatgagttttaggctttgctgtgataatatattaatatggttagtgtttcttgaaacatactgcttggaataagatattgcttttctaaaatgataccgttgctgtggtggatatcatggctcacattcctctaaaatgattaaagcaaatgtttcttctccaggcaatgatgaaagaccagtttgctaactacgtggtgcagaaggttttggagacttgtgatgaccagaaccgtgaattgatcctttcacgtatcaaagtacatttgaatgcactaaagagatacacctatgggaaacatattgttgcacgggttgagaagcttattgctgcaggaggtgaatttcgcagtccatgttcatgcatagtacagttcatccactctcttttacatgtttcctggttattactgactcgtttgtttgttgcttctgtaaatatatttcagaaaggcgcagtggagtgtcttcgtcatcttcgtgagattgcaatggttagtttgacagaataacacctgtacagacaaatagcgaggctagccttacctgtagtcttgttgggttaaatcggaaaagctaagctttgaaagcctttgatgtaaataaaggagggcctctggaaataaaaaggagagagtgtgcttgttcttaagaaagaagctgtatatttgtacgtttttcccctcttcgagtaagataaaaagaaggaagaaaggcaaagcatggaagaaattagtgcaaagatttaggatagatgatgggaagcaaggacacctgtagatccttttgccttgaatttcatcagtgtataaggtttcatgaggtttcatctctgtaaaggttttctacttaactcacattttgcagaaatcaaatgcatgtctctgtttatcagaattgtcttcagctctaaaagtatgaatatttgtgttcactgcgttccccttctcatttctcttcttataaaattcgtggatataaaattcatggtcccaccgattggcacgcctggtgggaccacgaattttatatccacatgtctgaagaagtcaatgccaagatcattcaatcttggctcggggggcaagcacatcagtatcagctcatgaaagctgattacaagatcagacagaagagaattttggagcatgagtcctcatactccaaaactgggggggcatgtgttaacagtgaaatttggtaatttagtaatcggcaaagacgtcatcggcttagaatcattatcggctgcagcatctcggaatcagccgatgggagttattaagtcgccaattagtcggattcctgctatattcggttaatgaaatcaatctactaaagaaaacttatccctaagtgaccgagtttaaagaggatgcggcatggcagtttatctattaattagaaatagtttgttagtttccttttatctttaggaaagtgtgtttagtgtccgataaggactttatatttttccttttatctttaggttagtttctttcttgtccaataaggacttgtatcaacccatgggtataaatatgtacacccggggtctatgtaatctatcttcacgatcaatacaattcggcgcatcgccaccctttttacttctacttttgtttttacgttccggtgagacttggcacccgacgcggggctgcatcgtcttcgatctccggcgaagggataagtccaatgttccgccggtccaggcaattgtatcgtctacatcggcgtcgttcaggctgcatcagtacattcgacctcttggattgctctggtttggatgatatatttgcctacctatttatgatatgtttatgttaatctagtcttagcatgtcaatttagctctatcggctgcttctcgttttagggtttctgccggtatcggctaaatcacgttgctagattagattagcttagacatctaccaccctgaaaactcagtcaacggcttgattgtctaggtattatgtttcttttcatacttagtgttgcatcagttaagtttgatctactaagtcatgcttagaaccataatctctagcctgcttcttgattgccaataagggtttcatcggggtttcagccggtgagttatctggatgttgcatcggctcataatgattgcatatacatataagttggatttagccgatgacaataaaggtttcattgtttaatctaatcttgtggatttcatgatatcggacctccagctgatgtgtgctttaaccctcggatcggtgcttatttatcatatcattgctagccgattggtttatacaggactatattgttattttattatatcatcatcagccgattgcctttatatcattatctacattggatatatagccgattgcttaaaccctatcgctatcggcatcggctgttatcggctatcggctggaactactccatcggcttgttagccgatcggctgttttgatctgctatttgcatatcttgtcagttgcaagatcaaactgactggcacgcccgtatctcatcaatctttggatctgcacaggagctaagcagatctcccaggccggtgtgttcgatttttttcgtcaacagatatatatttttatttactgagaaatacgtaatatatagttcacaagttattaaaccatatggatttttacaaattaataataaaaaatagcacacttagaataaactaatttaaaacggaggggagggagcattatcttttgtatgatgatggttgctgaattgttgggtttttagcacgatagatttgaaagcatatataatgtccacatttatttacactaccatttttttcccttcttgagaagatgttctatttctataccactgtggtttagtgacttgtgatgtgaataaggtggtggcaccaccatacccacgaagatgtacagacaaaactagcgaaaaccttaaaagagtttctcccggatgcaatctccaactttgtatcaaactatttattcaccctttattatttcatcttttcaagagttattggattacacggattctaagtgatctgtattgcttagacaagcagcagatcctctcttacagttacagtcatggaggtaagctcatcaggatacataacaaccgagttcagagcacatctggaccaacaacagttgctttgacaccggaggcactatgcacacggcagttctgtggcggctactttcttggacatcttcaggaagaaggccagattgtggtgaaacctgtcattgccactgccttcatcatcaacaacatcaccatcagctgctccatggatgttcttctcctggttcgatgagttcttggtgctgcttgcagcctgttcgtcgtcggaccagtaaccgttctccatcacatcctgcattgccagatcgtcgtattcctcgtcggacttggtggagtgttcatcaacagagcctgcttctatctgcaggaattcattggtgcaaaagaatttagcatcttcttcaaatccagccatgagcatttaagtgaaagcatggtagtaacaattatcagctgcaatggatatagttttttcttatttgcattcttttttatatagtttctgaaaactatattgtgtgtttatcacaactagaaaggaaattgctgaatcatacagggagcttttttggtacctcgtgcatatctctttcttcatcagttaggtcttcgtcagttccagcatcaggaggatcatcagcatcttcttcgctaccaaaaactgaataatcatcctccataagctgaaaagtcagggtctttgttaggtcgaatttatggcatcaccaatctactcaaaccagtgttaaggcagtgttgtatcacatgtaattaataataaaacattcgtgcgaatatagacgagcatctaatgctagctcgtccaatttttgcactatatgctggaatatcaaatgcaaatgatgaaacaaacatatgtaaggattgaatagatccatgtctgcgatggcagcatgtttctcctatcatactgtaaacacaccaatgcatacctcttttgaagggcaatctgacacctttggtgaactgcagcatgaggaataatatctgccgcccgtttcaatgccatcagctctcaagtcatctacacttcctgtatggctggtgccacctgtgtcactcatccatgcactgatcccgaaagatccgaactggagattgactggctccgccttcccaaatgtatcatacatgggattttttgttgatttgtcactgcttgtaccatcgagacttccattgccattgtttttatccacatgccaagctttggtgacactaccgtcagtattaaggatagccatcaaatttcttgaagatccctgtctttgtatcaactgaaacattcccttggaacccagtgagttagcagcacgctggttcctgtattcctcattcactacagctacagtgtttgtgttgaggtcatacaactgctccccagcttctcgcctgcgaagacagctgaaaaccgtggcgtgtatggccgccacactctggtcaacattagtattgttaatcttgggcaccagatgcttgtctgcacggttacaaaggtagtcctggattgctctgatgttccggatgtatttgatatatctgttcttcgctgggtctagtgtcatgtactttgcacgtacagcgaatcgctccatgtgtttctcctcattcgcaatgtataccataaatggtattatggaagggtgtttcttcattagccccatctgttggaaaatgaaaatagaaaaggctacatcagttctctagtatgcaacaaagtataagtaattgatgcaaatatctaactagtacgcaacgcaccacaaaattgaggcttagatgaactccctcaacaattacagattgtttctgctcctcccaggacgtaattaatctgtccaggctgtctattaccatctcgctttgcgccttgaacccttctattgccatttgcttgctgccgatcaactccgttctaggaggcaattcggaggatccatgatgagctttatcatctgaagtgtcgtctctgccttcattggtattaggatgagaaacaatgtcaagcttctgtgccttccgttttgcctttgcctgagcaactgcaacagggtctaagcattcgcctgcatgataggttgatgcatagagaagaggattttgcttctcatccgtaaagcctctcatcatatggcgtatggaatcagtagaaactactgtcgtgatacccaatctactaccctgagaaaaacagacagaccatatcaagtattaatcaagacccagaatcattcattgttcggtaagcgatacaatcttctgaaagcaatgaggtaattgataggtctagaaaggattttttttttcaagtggattttgttctacagacgttttgcattatactttaacatgtaacaaactactactatgttgctggtacagtagagcattcactcatccggaattgtatggttcgcgtaagtgataaacataccaacaaagatgatagcgtagatttgccgcatccgctagtcccacataagagtactgtcactgattcctttctctccttaattctgaacagaacaattggaaaatgcacagttgcacaaaaccattgttatttcaatgcattcaggtagctttccattggctgtaatgaactgatgattggtaactcattgtaacttctgaatttataaatgcagaaacaaggaaaaacatgttacctgcaagcaagaagaaagtcagccttctggtttggccccacatacttgtatgaagagagggcatcacatacaacacttaggaacttctccctagaaacaacgatggttgtttgggtcttgtataactcgaagggtatgctactaagagttgcttccaaaattttgggcttcagcatctcaacatcttttacaagggaaggggcattttcttcattatctgcagtatctgatttggatgcatccaagaattcactcctcatcacattgaacaccctcttgctaatctgatgatgccaaagaaagatgaaaaagaaacttcttatcttcacaagtcaagagagaaataaaaaaggacactttgtgcagtctgatctacagaagtaggcatcagcaattagtttcttttgcagctagccaaattgtgccttcagagaaaggaaaaagatgtcaaacagccatgaccaagtcagggaagaacaacgcataccgagtgggaacccatgaccaactcaagtcaattgctagatactttctagaatggcaacccatcaaactacaggcccaaggcaaaaagatcaagcaaggcaaacaggtctacatcatacagcatggtgttgtctttgtcgatagaacataataataccaagaaaggtacagtaattctcatcagctaggcaacagtttgcatggcagtatatctctgacaatgactcgtcacaaacaagtatatttccgaaaggacaagttcagtatgcaacaagaacatatcttgaaagatatgctgggtttttggacataaaaattgcgcggaatcagaaccaagtgaggcgctgggtgctcgaatttgacaaaggttccggtttcccctgcaaagaacgccctcgcgcaaaaagatatcgaaaatgatgtgagagagtttgatcaaatcaacagcagtgtgtgtaaagacctgacttgagagagtctggatgtgagctaagaacaaatctgcacatcaatcactaaaacccgtcacctttctttgtcaagatcatccatccccccccccaaaaaaaaaaaacatacaacatccagatactatactcggcatgcaattctatcaattaaaccaagaacaagcaagcaattcacagaaaggagcaaaaggatctatcacatcagcacgtgcaaaccatacacaacgctggatacgagaagcagcaaaatttccagtcgaatcgaagcggaagaatcacgagagagccaatcagatcgccaccagttggatcggggccagattaggcagaaattaagcgggagagagagagagagagagagcaggcacagtttttccattgttgggatcaagatgaacaagaagatagaaagatagataggtattataccttgaaggcatggcgagccttgcatcccatgagttggagggtgccctgaagcacggggcgcgtgtagcggaaggcgcggcgagcggcggcgtcggagacggcaatgtagaggagcttgggcggcggcggcggcggcggcgcctcctccgccatgtcgtcccctacctgcaaaatcaagaatcaagaagaggcctcccgcggcggcggatcaaagcaaggcaagaagcggcagcggcggtggcaaacctcgtgctcgtggggatgaggaggaggaggaggagaagggggttttgaggaggcgcattgcggcggcatgggcatggcgatggcggtgcgcgggcggcggcaggtgtcacgacgtccacgcagcgcacgcccatggcgtacacatggcctcacccctctgccgctctcggcgtcctcttctacccttcttcttcttcttcttcttctctctcttgtttctctctctatctgtgcttgctttctctctctctctctcttgtcttggtttgattaaccttcttcctcttgggtcttcgcttttggatttgtttttcgcctaattttctcctaattttaagggggggtcattaaatctagtggagttgtgtgtgtgtcctaccttattcttcttctacctcttctcttctcttcttctttgttccgcttttatagtgttctgttctcccttccttgttttggattctttgcttccttgcatcaatcaaatgcttccttccttgcatgtgtcgatgcctaatgtgtgtgtgctccaccctttggattagatataacatgcaattcgagctcaaatatattacttttatgtatccactctttttttaaaaaaaagaaagctttacagattgaattgtactattgccctgtttattttagctaataattattacgagcacgttttacaagccgttaattagtgcgatttttatattaaaaaactattgaacacttttttgggctattttttcaaatttttaatatttatttcgattgtttatggccttaagtaattgtcatgaaattagaatacgtatgtcaaacggcgtaggggaaaaaaaggaatatatgcaggtttcactttttttggtgaaagtagccggtcaaaaacgtactctctctctctctttgtttgacaaaatgttaatgcaccatgttatgtatggcattacaatgtcaattctacgacggtgcaaggatttgaccgtgcaatgcttgttccaatggtcctctagcttccttgatgatactagctgtttttgctaggcttttctacaagggaatccaagaaagtctttagcttaattagcctcgtctattcttctcttcttagttgttgttaatattaaacagcaatgttaacagttggtcaatgtctttggtgtataggacacaccttggctcgttgttcttgattgctccaattaatagcacaagatatatagtaatactaagagttaagtaaaaaaaaaaagtctctggatgaagaagcggttgcagctgcacaacgtgatgaggagcactcttgtgttaatccaaagacgtggacaagacaaatcttttggatttgtttatctggcgctacggtttctattactgccattcaattgtttgttagtgccactactactccagttagcgtacacactgagtcatggatgatgtgtaatcagcttctgattgctagcagtggtattccagatttttctttaaaaaatggcatctctatatgttcaattgctcaattcaaaattttcacgtctgtttgaaaaacaaaatcatttggcaaatatctagatataccgattcattcttgaattagcttagaggggtatagtgtgggtgcatgtatatgaacaggtgtgtgtgtcagtgtttcgtaatttttttttttttgcaaaattggaaaaaaaaacctttccaaatattcttttaaaaattgaaaccttagatttttttttctatatgcatcattcgttttatagtaatagatcatatcaaatttataaggtttgtagtctcacaattttatttcattgaatttttcgtataaactagtgtctctgaaaataaaggaaacaagggggaaaaaaaggaaagagagagaaaggagagcgggtcgcggggggtgcagaccgcgtccgagcccagtgcgcgccaaaaaaaaggcgatcaacggtcgccgcggcgcgccgcgttgggtgggcccacccaccttcgtctccgttggttagtttactgtcttgctcttcttccccagcttagcttagcttagcttagattagctcgccatgaatcaccttttttcttcactcatcagaatatcaggccagcaaaacaaaaccaaaaacttgatacgcaattagtcctttatcagctgatcgaaaagacgaaaccaaagagctaggataggagtactggtagacagtagacggtggacgaagaatccaactctctctctctctctctctctctctctgcgtctttctttgttttctttccttctttcttttcttaaaaaaaactaaaagaaaaattatactacctgaaatccaactgcttttgctagctaatgtgtacgcgaatattgggaggattgataaaattgtgtactgtcagattctctgatttatctgatccagcaacgaaggagattaagcaaagcaactatcaataacatacttcttctcctagatggatggattgtatatatgctctctcctttttttttcggcaatcagttggctttaatttttgctcttctgctataagaataagaatactattcttccttcataaccttcgtttcagactttcaggattattaaaaaaaaaagaggattctgggaggaaattaaagtgatcgtatgcaacagtacaaattttacacgtgtgcggtgcggttgccgccatttcttttgacattctccgttcttcttcttgttcattcatgtcaggctcgacttcctacagcagcatcgtgagatgagcaggattcctcctgtttaatgctttgcgttagccagaatctcttttttttttctttgtttcctttcttcaaaaatcaaagcaaaataagaagacccaatgaaaggaaatccagagagatattaagtaattatagcaagcaatggcacaaatgtatgtgtaattgtgtttgccgcaaagggtcaggcctgaatcctgaagaccggagccaaagaaaagggggcttttaactatttgccactcttacgaatggtgcttaatgatttgtcactaggcccacatatcattgacagggtgtgtggcaaatatttaattgccatgtcacaagagtggtaaatagttaaatttcccaaagaaaggagcagagatggttaagcaacttgtaagccgaactgtgaagaaaccatggttatgcaaattctcgttaaccatagatatccatggatataaaatctttgtttttatggtgatatttttaagtagttttcttgcttttagttaagctgtgattttgttatttggagtcgttcgtcttgcatcatctataataaattgtttgtaatttttttgaagtaaagattagaatgaattcttttattaaagaaaaaaagtatataataaattgattgtaattttttgaagtaaagattagaatgaattctattattaaagaaaaaaaaagtagagcagagatatacaaagactagtaggatggtcggtctacaagagcggtgacggtgcctgaactgactgaccgaccatttcaacattcaaactgcctgcttcacacgttcatttattcagaaatcaattatcaataggaagattatattacagataggctaacatgttcatctgtgattggataagagtagtacgtaacccttgaccatgcagttcaacattgtactactcctctacctcctagtccttgccgacctctctacagaagagcagccccttcagaaaacgaaaggttgttcttttcttttcagatgagaaaacaaagagtttggactttggagtaatagcttgatctttttttctcctctcttgtctatctcagatgggtacagagaccttattagttgtgatcacactgtgctggtagagcatatatcacctgctgctacagttaagggagcaacaaatgttcagaatttcagaacaggaaatcaacttgagttcaaacacagggaatgacaacttgggggtgtttagatccaccaccggcaaaaaatttttgccccgttatatcgaacgtaacacatgtatggagcattaaatattaacgaaaaaataactaattatacagtttgtgtgtaaattacgagacgaatcttttaaacctaattacactatgatttgataatgttgtgctacagtaaacatttggaaagggatgccatactgtgccatatgagctttgggcccaatagtaaacaaatgggcctccattattgaatactcctctcgtagtctcatctcatgtcagttgatgctgctccatgaacaaactgtaggagtatgtcaattatcattatcattattggtattatatggtggcattcgttccgaatgaataattgtagcctcattccggcaaaatttttgagaaataataatacaggtgaggtgattgataattgattcagggaatgcaatgcagtgcagtgcagctcagcagcagctatatacgggaccggaccggactaagacgaaattattccttccatggattccatatttccatgtatcttctatatcatttggagatatataatcatcaccacaatgtcctcctcctactatcagatgtccatgattgtcatcagaccaacaagacaatgagcaccagctttctttctgggtcatcttgatcaacctgggtcatcttgatcaaggaagaaaagctttgcagcccaggcatcaatggtggtgatggtggtggttgtgagagaacggccaccatctcctcttcctcgtcgtctgcgacctcggcgcatctgatgtacaaaaagaatcaagaaacaacagcagcttcagattgattcttgaggcgaacaagacagcagcagcttgtgtaatggtggttgcatacgctggcgacgaagaccggacatgcattgcatcgtatgccaatggcaggcagggcctactcaccgttctgcggatatatggagttgtagtgaacctccgcccaaaagctcaacagcaccactgcaatcaatcaagtcaaatggggagcatcagatcaagccaaacctgtcatcatctatgatctatccactatgatcacttgccatgtgcatattagtacctttgttggacttctgaacctttggttggatctcaatgtagcacgtatccttgaacgatgtcatcacgaaaatcttaactccatactgcagcagattgtagcgttacattagaacggctttggaaatagaaaagactagtctttgtcagctctgatttgtaatgccatgaatgagacagcagggagagagatttgtataaacaccttgtcagcagcagcctgtagagtcacatggtcaccccattcaccatttctgttagtttatgcactaaaacatctgttaggcaagcattcacatgcacttggtttgtattaacaacaaatgattgaattgctgtggaacatactgtgatactttctccaagtaatcgtcatatgccatggggacatatccatcgtaggcatcacggttacttttaagctgggagacggatggttcatcagaaggaagagagatggaaggatgcaaaataaagcctgaaactagggatcctggagcaaagattaatgcagatatttacctggctcataatctgctgcctcacaaactcatggtgatcgggactttgatacagttgatctgatagtgcccgaaactggggaggttgaggaaacacaatcagcatcaattgatacgtctttcacaacgcatgtttaacagcagtaatgaaactttatactaatattcaagcacatgaactaccccaaccgctgatatggtaatgctaaaacttcactattaacactataggataaccatgtgccaaagcagagggggtaaaggaaagatatttttaggggaaaaatggtttaatagggaaaagagccaagcatcatggtgaggttgttagttggtactaacctgacagttgccatctcctttcaccttgtgctcaactagttcatacaacctcaacctacaagattacataaatacaaatttaaaaactcaacatagatacagcatgtatagtaaaaaaaaagttaaggaaaaactgaatcatatgttagtaacttggcccatcacagaaagcgcaattctttcagaggcatttgtaacacaaacagggtatgataaggtgtgaggcttgcatatataacacaaaagcagtatatcacttagaactgaaactaagttgacctttctgtcagcctttcatggtccatggtagcttcatcgactgaagggatctctccattaattttaggaacatgctggacaaggcagaaacaagtactttaaccaaatgtgagaatgtagagagagacgccaaactaattcacagtaggttcatttccatctgatttctgaacaattattggaaaagaaaaggacagtagctctactgctatgcaacagtataacactgtgggataatactagtttaaagcaataactagcatggttttagttatttgagaagttctgaacttcagataactgttgtgccttgaaattatgctgatactatgcactttgtgcatttatgttttctcaggatacacacaacatgggcaagcaataacatatggcaaccacaatgacacaaggaattcagtatacatggcttgaaagcaaaactcaatccacaaaacttggacaaaaacagaccaaagaatatccaaatttaattgttctttcaatgtacctaaagactcatggaagcatttggtgtcacatccgttatttaagtccaatggcatttaaaggaagtggtccaattgacaacgatataaagcgatactccctctcaatgagattttagccatggattaataaacatataaaggtgttttgtaaatatattagctactatcgaccctgcttagtagctactaataacttaataataaagcaactgcccatgtttcatttggtgaattgaacagatgttaggtccttcctagtttcctttgaagcaaaacttcctatcttctggtggttcctgatgcagatcaaaaatcataacaacactacttattaacctggcttcaaagggtcaatagacttacgggaactggcaccatggggtaaaacctctttcctacttcttcatccattgggaaactgtcgtcagtgtctgggcatgaattggaactagtcggctctatatagactgtgtcatggtcatgctcaccagcatttcctgcaccacaccaaaagcattagggggaaaggcagaaggaacaaatattttgcgagtcaaattacagatattttcactaccaggatggtagatgcctactgatgggttgtacaaatcatatgtcagtgcagaagaatgcaagtgcgtctcatccagatgtgatgcatctgcagaaccaaaatcatatacatgaggaacactatctcatttttcatagtttttttctgtaaatacatgcatgtcattccacaaaactacctctagcataatggaggtcacaatagttgccatcaccgtaaccatgaggaggtccatagtacccgataggagcaaaagggtcacggaaaaggtcataaccccagtggaaattttgatctttctcacacatgttcatccgttgaaatcaagctctgtcaaaaacactcccctggcaagaagattacgatttaagcgtcagggtattaacaccagatagagagagcaaaaaaaaaaaggctgatattctcggtttcatcaaagttgagctctggtgactggtgagacttgacagaaatgcgtcatttcatcatcacattaaatgtgcgatgataagaatggcagattgcagacagctaacgaatcattacacagtcctccagggaccacggtggaattattagatactctagcgcgtcctgtgtatcactccaagcaaccaaatcagcaacctaatactaataagcaagaacaaaacatttttcgttcgctgcacactgactgaaagggtccaatatcgttatccccaccacaccaacaaactaaaggttgcaacggtctaacaattcagtccaagccaatccaatacttttctttagcaaacttaaaatagcctactgctttgtaactacatctgatatgtgcgtttaaccttttgatacgaacaattaagctagtattaattaaaaaataactatacctgtatctaggtatattgcttttccgcacagctattgtctcaaggagaaccaatgatgaaaaagttgcaaaagtattataatccaacaagcttttcccaatcgaagacaaacaaagaaacaaacacgcggttttgacctaaagtgtagcttcaacgatcatgaaccaaactgctgctaccttaacatgcaagattgcagctttcttcctttcggttcatggacctaatcatttccaataaagaaaggggaaaaacataaaaaaaaaaaagcaaccctttttgttgcaccactgccagttcataagcttacaaaatcaccagacagcgcgataatccggcctagaaactcccccccctccccccccccccaaaaaaaaaacgcaatatgaaaagagatgataaccaaaacaaaaaaaatcagtacacgaacatctcaagatcacacaaagtttttccctcctgcaaccgcatcgatcagcaaagctatgggagtaaataaacttaaattagaaaaaaaataagaggaatattcgaggaaaggactaaccgcgtgtgctccacctacgacgaaattcctcgcgtccgtgaggggattctgcagtcgaaaaaaattggatcctttcgacggcgagccctgcgattccccggaatacgatcctgagcgcggataggagttggggacgcgagggtagaagagggatcgagaggtcgaggaaaaaccggagcagattacgtcgccgcggcagatccacggccactctacgagtccacaccacacggggcagaactcaccgctcggctcgccgccggcgaggcacgtccgcggcggaggagcggcggcggtggtggatgacaacgccgatgagcggcagcggcggcggcgagggatcgttcgggaggaggcgggcaaccacccggccgcatgaaatcgacgcgcgaaggagtcgagagcagccagccaccggagaattcgtggtgggattgacggcggcgagagagagagagattgctgcgtgcaagaagcgcggcgagagggagaagaagaagatgagacgggcaaaaaaaactgcttcttttttcttgtgttcttgagttttttttttttttttgaggtggcatatgctcttgtgtttatagcgtggtgcgtgtgtgttttgtggataggaccttgaaattttgttgtttgtttgtgggggttggagtgaacaagatggccttctcctcttgtgtggcggcaaggacgacggctctttgaaatttttttggttgttttatttatgacattttgttgaccttttgtttgaatttgatgagaaaaaattgacctaggaattaggtaggagtatgccagaattgattttaaagactggtgattaataaaatgaattggtttttaatactacgtctcagacagtgtgctcgtttgattaaataaagtcgtcatgtaatttgaccggtttttttctatgttgttctttttctaccttttttgtcgagttgtgcagagttcattgtaggttttagaagctaacttattatagtgatttaaaatggatacatattgataaaatatggttcacctttcttcgtagccacatgattttgccatgtttgacatggaaaatataaggtcttttttaatccaaataaaagagttgttgtataagttatgtatgttttcaatttttttgttaaattgtgctaagttcattgcaagtttttaaaagctaacttcgtatgtgctagtatttaaaattgataaatattgagaaaaatatggtttatctttcttcgtggccacttgctttgtcgatgttgacatttgtagcatggcaaacatatggcccataacaacaatagtaccactagctataactaacataatagaccgcactgtgttggaggaatggaaggactgaaacatagatatcgataatattgtgataacacaggctttctgcgtaatgggttaggcaaaaaagaactcgtgtctcaagagtttccttttgtagacaatgaattgattcaatttagagaaaacaaggaaattggtgataaaactctactacagtttgttcaaaatgcactagtcataatcccttgagaatattctagtaccctatttctaatagaagaggtacctactgaaaatcgctccaacaaatccgcttaagaaaaattacaaagttttgaactcagaggtttttccaagggatgcatgttgtttcaacctctcaccaaaacagacaagaggtatatcactgaaaattaatacccagccatatgggtatatgcagtgcgcgaatacgtttataccccacccaattagaataagaggaaataaaacataaatggagaaagttctcgtgataagatcagccaatagaagaaaaaagtctctaatttttcaaaccattctaagcatgtgaaaggtcaatagcctaaaaataaaaaaacctctactttgtgcaagtgataagagagaatatgaaagattttcctatttttcttgattttcttaagatttttttaacctgaccatgaatagacttatatatctcgatatatacatatataatgtatattatagacttatgtatgttttcaatttttttttgttaaattgtgctaagctcattgcaagttttaaaatatatttttgtatgtgctagtatttaaaattgataaatattgagaaaagatggtttatctttcttcgtggccacatgctttgtcgatgttgacatttgtagcatggcaaaacatgacccataacagcaatggtagctataactaagataatagaccacaatgcgttggaggaatggaagaattaaaacatggatatcaataatatcgtgataacacaggctttttgtgtaatgggttaggcaaaaaaaagaaaacaagtgcatcaagagtttccttttgtaaacatattgttagatatgtatgaattggttgaattttagagaaagagaatatagcttagaattgatatcaacctaaacctaactaggctcaggattggtctgataacccgcaaagactcaataatacctgcactattatttcctccactctcaataaatactcctaagtaattacgagttgtatggttatatataagacgttacacatttcgatgatataacatacttgcaagtaatttcagtaaaacaagaccagcatccaaggtataaacttaaacatcgtcattatctacttcaataacggagggagcactactgccatgatcaagctaaaacgagtacaactaactaagtggtggtgattaggaaaagcactgcattgcgttggaattttttttttaaaaaaaatcactgtactgactgggtgatgaatcacgctgcatttccattttctccatttgggtggcagtgagcccatgaagtaaaaaaagtaaatatggttaattagaagaaaacagaggggcaaggtgaaaagcggcagcgcggcgcaccgtcgaccagtggatcgcgtcagcgggtagtggggccccacgtgagcagtgggggcgttgacgtcagcggtacgcgagtgaaggggaggggggggctcgcgttccgagggaatctgagcgctctgttgggcatctgacggctgtcagggggcggtgggtcccacggggggatcgtacccccggatgcgtccaactggagggctttggctttcagtttcagaggggtctgggcgaattgcgtgagtccaaacctctctctctctcttgtttttgtccttcaacatcaaccccaatttactcatagaatttctcgtttttttaatctatactatgtactgtactcctactaccgctatatgaagtggtatatatttattattttattttaatggtgacagagaggatacacgtggacacattactatacacgtaaaccacaaagatttaccatttccatcctataaaaaacctaatacttgtgtgtccaggttcaatgctagaaataatttttttaagggcagagaagtatgactatcgtctatcacaagtgcacgacctgtgtatagatgaagagtaggatcaaatcatgaaccttactaaagtataaaagtaaagcttccgttggctgcgtggttaggggtgtttgattatcggtcacaatttatcacgtttaaatttagatatgtttaatcaacttgacaactgttttgttgtagccacaaaccatataaattaagttccacacatcaaggataaaaaaaagtgtagcttgctaattaaggtatggccaaaaatttgattgtcttaacttagataaacatagcattatttatccgcaaatgatgataaagtatggttgcaaaccacttcctctgagtctcatttgtacctttatcttattacttttccttttttattcatttcatttgtttgattattttctagtattctttttcgattatggaatatatggaaaacatatgtgcaccgtctgctagtatccatcaaaacactacccgtgttaccgtgtaatatctttttaacacgcttaaaaaagctatagaggatgaataagagggataaattcgtgaaactcactaagttctcgagtgaaagtaaatataccttatgtgtttggacctcatacaaagatcgtgttttttccacgtctctaaaatactttttaactttaaaagaaatattttactgtattgcttattatatcgtttggttaaactatgccaaacaataattgttgttgcatcccggccatgcatgatgggcttgaattaaaaccattatcctctctaccattagtcatatcttcccgtcgtcatcaacaggtagattaattggatctctaaaccttctgaatgttcatctccacacctaaatgatactactatgatagaagtagtctttatattctggaaggtgatttgtactccctccgtcctaaaataaacacagccatgagtttttgtgtctaactttaatcgtccgtcttatttgtttttttcttgaaaaactaaaaaatataagtcatgcataaaatactattcatattttataatctaataacaataaaaatactaatcataaaaaaaaattatataaaacggccgattaaaattggacacgaaaattcatggttgtgtttattttgggacggaggtagtaggtttttactaggtatgtatatgttgcttcagctacacccccttgctgttctctttcacggtacctgattgatatacagagatgatggctggaattaattgtggtggtcatgctcaagcctgtgcttttcactatttgtgatagggaaaacaaacagagaaaatcattactgatccgtgaagaggaaaaaaagtattatttaggctaaaaaaagtaggctcacagatcataatcatgatgacttggatgagatgcttgtgcaattaggcacctccaaaagctggacattcggatggtagatagattgagtgaccccagcaaaatgatcataaatataaagcttccaaatataagtcgaactcacttgcgcacacaccacactcatgtttataaagagattgggcttatccttaccattaaatgcacccacgtgtatatgaaatacttttgaggttaaatctaaaaaaaatacgagcatcagtagaaagtctagaacttcaattaagtagaaaagtttcattacatgaagcttaaaaagatattcactgttgttcatgtcaattcatctgaaagcttatgttcagaaagggaagataagtatatacgagaaagaaacatccaacatgacgactgggttttttacaatgtgaaaaaagaacttttcagaacataacaaaactagtgatgcttggacggttttaacttttacacaggaaaatgattccaagtatatatgacaaaaccgaaaggaaaaactgaaagggtcatgaatggtgtcacatccttggccttgataggcgatgatgccaccatcttcagatagaaacaggttggaaaattcaggagttatgaactcttcttcccatgaaaatctacagtcgtttgattttcaaccgatgaaacaatatcagattttcagtaattcatccttgtgacagcaagttaattctactttcagtcttttcctaactgggttcgcaagctgtataaatcaatggagattctgaatccagctagctaaaacagtgagactggtacaagcagcagcacaaaatacacagatgggagatgggcgtgttgttgcttcagaatgcaggcagacttcgccatcagctgcaactggcaaataccaggcgatggaatggagtggatgtgtgtgaagaggacaaggcaaaccatgtgccctgcaccgcatctcaggcagaatttctaggccagaaacatgcatgtgtttgcttgcttccctggaaatcaaacacaccagaagaatattttttttggaaacacgatacaaacacaaacgctcacatacgtgcgtacacacatcctattcccatgaacacatccaagagattgaaccagtgtgtcttgagatcgatgaagttagcacagatacctcgctccgcctctaatcactaaaagaaaaataagccgtgaatataaacattaatatcaagtctagagtttaaaccgggataggtaaggtctaccataagggacctaactaaatgagctacacttggtaccagaagaatatttttgctagacagtagtacagttgagaactttgctgcactgtcaatttagggtgaaaaagatggcatctttgctgctgtaacaatggggacacgatcacaaggttgatagccacacaccatgtgcagatctctgaagatgatagtgaacagggagaaagaaatcctccccttttttcccctctgcatcaacgtgggaattaagcctgaactcttgttagccaggagttgtagcagcaacttagcaagcactttcgtttcggcacgcgaaccgagacggatcggttttttgtcaaaattgaaaggtgcccaacaatggcatgcctaccaccaaaatctgccgaaatttctgctcggttatatcatatcacgaaaaagttgagaagatgacgtttcatggaatggaagaaagtctgaagaattcctttgcttccagtcactcacagtgcttttctacagaagccacaagaaggtgaccaccacaaccagaaaagtattcagagaaatttgtcaccacaccaggatgctctctgcacagaatcttcaccatgaattgaaccatcttggataggaaaccatcatgcagcctgcctgttggacttggatcctggacagacaaattgacttgtattttcagtttctgaagctcaaattgtgcaaaatctgcatatttagttttcccaattggaagaagggtctctttcaatctgcgccgccgagtcttatcttaatcaaaagaatggctagcatgtaacgccggccatcggatcgttctgaaatcgaggttgagataagctacaatattccgattggccggcggcaaatccatcattcaggccacatcttgcctcaatctgaatcatccccagcaatccaatccccttttctttcatacaagaaagctcatctttttttttctttcatattgcacaaacaagatctatattacatgatgaggaaagccacagggattatactgaaaacacatggaatctacaacctcaagatgcatcacacagaaccctataagataaaaagcttcacactgcaactcaagtactcaactgtgtgcccgaaatgggatcagatcaccccaaggacaggaagcatacagaggaagaagagctttatccctatgaacaacttagctatatacttacaggcaggaagctactgtattctctcagcaagtctttatgatctcaggcttccagctccgccatacaatctgccggcaaccgaatttgaattcttggaaccttctcttcagtgaccccttctttggccgctttgagcccggttcagaaaccgacccatggtagtgcagaggaggctgtggtgtgccggtctcaatgctggccacaatcttctgaaccatctcatacacctcactcatctttgggcgcgactttggtagccggacgagacagcggttcgccacactagccagctttgtcatggacttgaggttgtagtgcccctctagccgtgggtctatgatgatggggaaccgcttgatatcagatatgtatggtttcacccaatccaggagcttctgctcaccctttgggcggttccggtcaatgggacggcggccggtgatgagctcataaaggagcacaccatagccccatatgtcactcttggcagtgaggcgtccggtctgcatgtactccggagctgcatacccaagagttcccacgacctgtgaatttcagatgttagttcagtgaaagaacaaagaagtgaggctttgaaatttagtacagggagaatctacttggaaatttagtgcagggagaatctacttggaaatttagtgcagggagaatctatatattatatcatttgtaatattataaagcatgcttagcatcaacactttaaactgaactttcactacatggtgttggctttttgtaaacgagtgatgggtccattttcccttttattttggttaaatatatgaatgctgcattcctagatgctagtgctttttgactgcttcagaaactatgatacataaatcagagatcaattatgtgtccaaggcaattctacaattggttgtggagcaactgagtgtccaacttcgttggtataaaaaatggatcctgttatagatgtgaaacagaaccaacttactaaatgcacatacaccatcaattatcatcgagattttctttatcttaatttctcttaggtcatcatgcatttttttttcccaatacaccaagttaaagactctgggggcagaaaatccagtcacaatacaaaagtgcaaaatggttctctatttttttaaaaaaaatgtgggcagtgtaaaatggttcttggtatatcaatgcacataccgctgtagagacatgggtcaggccttctgatggtccatgcctagccaatccaaagtcagacaactttgcattccagttctcatctaacagaatgttagatgtttttaggtcacggaagataacctgcatgtatatattaagtttagcaccatagatatagcagacaaaaaaacctaaagaagtgcatctttcaacatttcattgcagataggaagtgatgcaacattgcacaactgtttcaggtacaactggtagcagttttcatcatcagagagcaaaagagttacctgaaattccatctcttcatgcagatacttcagtccccgagcagcgtccagagctacttttagtctcattggccatgatagagttgaatttgacctacttgacaagtgatcatccacgcttccattaggcatgtattcgtatactaggagacgctgtacgcccctttcatcatcttcagcgcagtagccaattagtttgacgaggtttggatgctctacaatcccaagcacattcagttctgttaaccattctttctgcccctgaaaaacatgataatttattagaacccaaattagaggataaggctagattcctgcataagtgacttaaaaaggattcatcaagcaaggtgcacttgagaggaatttcttatgccatgcttgactgtaaattgtcgtgcgggtttcctgaataaagtaatggtttcttttctgaagaaaatagaactggtgactagaaaatgctggtttattttcgctccttttaaatgtgggaaaaaaaacataatgtaagatatgcagtacaagtagaaggaagttgctatgtgcattgaaagcttgtaatcggtacagttcagacgagaaataacttgcctgaagtcctttgcgattcagctgtttaacagcaatctcggtgcgctcagttggttcatcggaattcttgatgacacccctatacacacatccaaacccaccctcaccaaccataagagaccggctaaaattgcgagtggcattcttcagctcagagaaagagaacaccctgaggttactgggccgatcagtgaagctgggatactgtgtcctccgtattgattcggcactcatgtcagagacattcaaggagttgaagtcggagccggaccggacatcccgctccgtcgatgttgtgctcaacgaccggacagaagccgacttgttgacgggatcctcctctttggaatctccatgcaagaaaggcaggcacctcattgctgcaatgcagtgggaacaaattaggagctaattcatgcttcctccatgcaacacaaacacaaatagagaattggaccgagaagatccattaggaatggctgctaactactgtgaattagaacaggtataaaactatcaattactttcttaagtttcctgactaggaaatgctttcccttgcttcaagcaataattttagtactgaaataaggacagaaaaaactttggagcctgaattatgcaaaatgacaccagctaacatgtgtgaagggaagatcttatcatgaactgacaagtatatcaaatctaaaaaaacaagcatttttactgttccaggatccaattacagcaacaatcaacaggaagtaggacaaaaactgggcctttacaccccagggacagaaattgagtgctgagagaattctgtaaatgcaaacatgcctaagctcaagattggggaaaacagcatgacgagggcgaaatagcaccaggcctgatgaaaccatacagtcatacataccgcaactagcgttaattaaaccgaatcatcaaccaaccttaatcctaccaaaactaccgctattcctgacaacaaatcaggaaggaaaaaacatggcaagatgtacgattccaaagtcaaaacactctcgaacgcaaaacgcaacaagaacaagtacagttatcacctaccctagttagcatacatacacaacatctcaaccaaaaaaaaaaagaaaagagatggaaaagaaaagatgataccttgccaatcttgcagaggcgaagatgatccgagaggggaagcaccactccgcctgcgagggatctctttgtgtgtgcgatccaggcaggaagcgacggggaaaggggagagaagaaggcagatgagcacggagatggagatggggggaggtcggaggaggaagaaagacttggacttgggctaagcagcagtcaaagttgggagctttgcctcatattgatttgttttatccctctccctctcatcagtctcaggttctcccctttctctctcacagtcacacacacctactgatatttttttaatatttttttaattttaacttacttatcgttttagtttattagtattagtctaaacctaaggtggtgtttgaatctcctgaatatgaagatgaaaacgtatatgaagattaagtgtttcacgcaaaacgaggtactaataacatgtgattaattgagttttaattattacaaacttgaaaaatggattaatctgatattttggaataacttttatatataaatttttcgcacgaaatacaccgtttagcggtttaaaaagcatgccacgaaaatccaaaatttcatctgtagtggaaacgatcaggacctgtcacacacacctactgaacatttttaaatatatttttaattttaacttacttatcgttttaattagtttattataagtctaaacctaagtcaagtataatttttaactgttaatatttttaaatccactaaaagaaaatagttttattataatttatatgttgttaaactctacggaattttaaaaattaatggacaaaaatagttatgtttgacttaggagaaacttagaatgacaagaaatctaaaacgaaatatcactattaagcagtttgcactcttattctagaaggaataatactagtattatattttgcttcgtttttgtttaaggttatgacgattgcatcgagattggagaagaattctttgtctttctctttcacttgtgaacaacatggaagcctgaaaggaagaagactggactttagactgatgacctgatgagtgatgacgagcaaagcagaaaattaaactcgattgtttctaaatacagttttttatttttagtatatttctctgttttccaagcattagtttaaattgatcacaattctgtttattttagaattagaaaaacaataactagctttttcgtcggttggtgaggattaggaaagcaaagaagttgcctggctcaccaaacaactaccccaactataataactgcgttttggtgtgcccctttgtccaaaaactcactggagtatacataccgctttaaggttgatatgactagcttcattttttttctcaaaaaaagtgcgcatggtatggcccctatggttctgcttattcgtggaataaaccaaacgatatatctacaaacaaaaaataatttgtgaataaaacttatatatatatatattcttagcgatttaaaagtaaaaactgaaaataaactttgatgaaaaaaaccccaaaatcaacttcaaatataacgttgaaaatttaaattttggctgataagcataagcatgtctcctggcttagaaaaaaaagagaacatgtaaatttcatgatattttcatagaaggaaatttagttcctgtataaacgagcaaactgcatttcaaagagtgctcagtagtaaaaattacagatatttgctactgataaaagaaaaaaagacactcgtgtggatataagaaaaagggaaagcaaaaggggtagagaagaatttaatgggagggagttacgtggcaggtcaggtggttaagaccaatgatgtgttatgcaagagctcacaggcttaacacactttatgttagtatcgtcattttgtagtcacatgcaagataagaccagtatgatgatttcctagataactcttgaacgaacttaatctcctggatcagtgagcatgtgagtgtgacagtgagcatttaactaacctgacactgcatttgcatccatcataggcggttattgtatacttttccgttaaagctgtgtttagttcacgttaaaattagaagtttaattaaaattggaacgatgtgatagaagagttgaaagtttgtgtgtgtagaaaagttttgacgtgatagaaaagttaaaagtttgaagaaaaagttggtaactaaatcaggcctaagaaaaaaacaagaagaaacgaatgacgaggagtaaaatattactggctgtgttgatccgagacattaattcaagagatcaagatgatcaaagcatccatgtgttggtgaagagatgataattgtatatgatcttgttgaatcatgacagatgttggagacttggagtgtaccccactatccgtaatctctgcagtaccttcgcatcatgctgtttctgtaattctgttagcactaattaaactagagattcagagcgcagttgcttatgattgatttaggtcatgttctttttatattatctatcaaattattgtcgtagattatttgttaattccatgcttttaaaaatatatcttcttgaaaaatatttttttatttgtttggtttattatgcataacattgaaccgattcctataatcaactagatcatcgaacactaactaccttaatcttggagggatcgagttgtatagggtatgaagataaccagcatgtggcaaacaagactgtcagattgtgcaattacattgatgatgaaacgtgggtgctaggtacgacccatgcacggtctagttgttaaaatcaaagaaaaatagtaatgatccaacctggctgcccaccgaccatcgtataatcgtagcaacttgcctagcatgttattacgtcgtacgtagtacggactacggagtactacatttgttatattaattccatgaagaaaatgatttcgtagagtacaatgaacagttaactcttaactgtaactgtaactgatgccgttctcttttgtagaaatcagtaatcactcatgatactgaaatggcaagtattcccctcattttttaatatataccatcaacaacattttaacgaaagtttaatcatccgttttattcactcttttttacaaatataaaaaagtttgtcatacttaaataacacttatcacttatcgataaatcaaatcacaataaaataagtaataattatataatattttaataaaataaatggtcaaatatttatcgaaaggtaaatgatagtcgtatattgaaaaacgccgtatattgaaagcgaaggtgttgataacgtagatggtatggaattgagagttgccccttggtggacggcatgcagcttgcaataatcaggtggagatgcatttgaaatgtacagtactccatctattcctaaatataaggtttttttttattggatataacacctgtttgttttagtttaagattattgcaatctaaattattgaggcagaatatcatgagctggattataataaaccaacatagaataagcagtcagctgttgtttctctggattattaattgtttgttagatgttaatcacccaattatcttaaaaagtacatttagagtggattaccagattatagtaatgctatctgtttgttttaacttacttctaataatttagattataataatcctaacctgaattaaaccgggtcttagtataacgaagtaccgtctaaattccgttgtattagaatgtgtcacgtttgggcaaaatcttttatattttaggacgaatagagtataataaataatagtcgtacatgcccctgttttgtgtcaccatctggctgcagttgcagatgatgatccatcatcgtcatccatcagttttgatggcagtgtggaagcggaccatgattaatttgatttattgatcaccaattcgccgtagtgagacggatggcttgactttgacttggactttgacctcatcctcgaagtcggcaagcccatatatgggcccactccatattggtcaatgtctcaatgggccgggcagtctctccacagagccgaagaatccatccaaccatccacgtgtcccttcaaaacatcaggaccgtctacgttgttcactgtgagatttgcagctcttcctttccagtagcaaacttctcgtactttcaggtcaaattgcaggtaacacgactacatagtacagtatgtatacagatgagaaacattcccataataactactccatctgtcccaaaatataagcatttttagacttaaacacggtctccgagatgctactttgaccaacaatatctataaaagtaatatgttttaaataaaaagacttacatattatgataatttgtttaatgataagtctagtaacatcaattttacatgattgatctttttttattaatagttaaagttgaaaatgtttaacttatcactatgctaaaaatgcttatattttgggacagagggagtagtagtttggtcaagagcatcacagaacatgaaactatgacacaaaacctagtacagaatcaggttgtccaccacaatataaaactactagcgtgatatgtggacttagcctcaatgtagtgactttcttgtttcaaagaaaaaagttgtgactttcagcaaggccagtacactgcaatcgcatcataagttcataatcataactaacaagtgtaaaaagttggactacaccttgacaagcgatgacattgagcaaatcgcatcataagttcataatcataactaacaagtgtaaaaagttggactactccaccttgacaagcgatgacattgagcaaaaaacttgtgaacttctgtgagatggaatgtacaatagagcctcttccgttatgccacaggtaatgtacttgagagcagattctttaatatcatatcaagcaactgataatacatatagaggcaccatcagtttcagactagctgataatacataccaaaagaaacatctcgagtttcacttgttgcctcagcgtgaggttgtaaaaagtgaatatcagattacttgttggttcttccctgtgagatttgcatctctttccagtaaacatttcatactttgaaatcaaatggtacttcctccagtaaacatttcccgtaagactttctagcattgtccatattcatttagatgttaataaatctaaacacatatatatgtctagattcattaacagctatatgtatgtgggcaatgctagaaagtcttacattgtgaaacggagggagtagctaacatgacaatatagtgattcaaagggaaacatttccataattagttttgttacttttgtcaagaacatcacaaaactatgacacacagcctagtacataatcgggtcgtgtccactacaataaatttaccaaagccacacggtggacttagccacaaggttgagaattgacaattacactgcaataacatcagaactaacaagtgcaaaaagttggactactccaccttgagaagtcatgatatcgagtaaaaaacttgtggatttccttaggagttaaccttttttaagttgtcttgacccaaagccatactgaagagaaatctattttttatcagaagggcccttatcattagcctgagacccaaccaagtcctcaagagtgaagttaagagtatctgttgagcctttcttcacctcctctccttgttcggctagaaagtcttcgatgcttcctggctccccaaaccagccaagcctatccgcgatcaggtggaaattattgcagccgccgcaacgagcgaccaccactcctttctcatatgattccttgctcgccatcttcatagacctggtctcgcaaaccttgcacgtaaagatcatggcgaggtcgtgtctcggtgagatcttcaagtttgatgtatctctaactttgaagccggaatccgatgaagggaccgtagctggcacggtgtcggttttggaatcctctatgtcctggttacggtcatctgaagcattattgcttgcttccatgatagtttgcagagatcttatgccagcagtcacaggtgcaggaaacaagaatcctgcaataacagattttcattagttgactgtttaattaattcctattgcaaagatgtaagtaaattcttgtcatacgtaatgatttgaatggtaaatgctttagatatttgccaatctggcaggaactgacaactagcaacaaacagacacaattgactctataatcttatctttattattactactatagttgccaccaagttttttcttcagttcttcaaccatatcaccttaattttaccaaaatcaatcccaaaacaagggaatccccttgtttccatatttcaatcttctcatacccccaaacacaagggaaaagggcgcagacgcagtgtaaacaaaatttgactgtagtggcagcagcaaccccggattcgagcctccaaccaccggcctctccaagtaaaacacacatccgcgagagtcatcaccaatatcgactagatttatccatgccgaaccaaaagagggagctaaagcaaaaaaaagtttgggggaatcacctcgggtggacgcgggcgcgggcgattgattcaggacgccggcaaggccgcggcgcaccagaggcagaaaccgagtggccatggcggcgaactgtcgaagcaggagaaggggaagggctggtcgccgccgccgccgcagccgcggggagccttcttcttcttgtcggcgaagaaacggtcgaagagaagaataagagagagaggcaacaagacaaggggagcgtgtgggccttgcttttataattgggccctagttttactttagttgagatgaggcccaatacagcccatccagatttggatctaccaattgttcctcaaactgggccgagcacaaggcagttgtgggccgaccggactatgggcctaggccggattcatagcccaagaggttcttgtcataattgggcctaatgtaacttgaatggaaatttagcccaatatctgatggcgaaccaattcggcccaaactaggatcgctaccattggttactgggcctaggcggtgactggatgactcgctcgttttgcggctcaaattgggccgtaagatctgtaaatggctgcgatcgatagccgtccgttagagagcgaacggcccagatttgtgacatattttgctctcccttcgctgccggagacgtcgtcttctccggcgacagcctccgccgccggccgacatcatcggcaaagaaaacgaggcagaggacgtcgagaaaaaaactttggtagaagcaacggaaaccgatccagcacacgccgaatcgatcgcttcttgcttgatttcatcctgatttgcttctgcgttttccttcatccgtgtgagaactgagaagtcatgcatggaatctgagactggacagcatcaactgcatcacgccattatttgatgcatcttcattaatcgaggaacataaagcaaacagatgctggacatgcagatcttgagcaaagctggaacagctagatcaagaaccaagctgcacatgcatggatcgcatccaaaattcatccatccattcaggccatgccaatcatactgaaccttctagtagtactgcattaatctttttgctagtatttgggtttaatgcagtactactagtactatgcaaattcattttcttttccttcggaatcagttaatatgtttattctatagaaatgaaataagattcagacattcagaatatcaggcaaagcactttgccaccagaaattaacccaaatgctagcaaaaagattattacaagtctttgtagcaaactctgaatgaacttttgtgtagtgatgaagcaagagagaatgagcctggcaagttccttaatttgtacaagtttctctgccacattttttgactgttcacttcagacagtatattggtccttgtaggcgtcctgctgttagtcctccatactaaaccatttgagttgtgtttttgtgcacgtttttgtttgtggattgttgttgactgagatgtattgtagacatttcactctcaattttttttgatcgagcagcacgagacagtgttcactctcagattcgatagtattctagtattatactatgaatagatgacatcttttcagtttcagataacaaattgttcattttctgatgaaatgactgtgaacaatcttagtagaattgtgcaaaattaagagccaggtcctaattaactagctgactccgagaggcggctaagatgaggttgagcaaagcagcacgcaatgttttagagagagtaatcttgcactaccagttcaacataaaaacctgcctctgatgcgtcattgcgtctgtattattttgacctgtgaattactcctaccagctagagtagcatgcttttgttggtgcatccttcggacgaattggccaacatttacatacgaaatggaggatcaaaattaacataattacagagacatcttaatcggatgatcatcactacacggtccaagtgtgaatgctgatgctgtaggagtatcattcacattatgcagaggctggacacagcagagcatgacgaaagaggcgtcgctgtcatatggtggcttaagctgccttctttcctttgtttccatcctgtgacgaggcgaattaaggaggcagaatcatctactctcggagacaaaatcaaagcagaaaagaattgttaattcttctccgctgttctgcttggagtcgtctagtagtagctaattacgcagcacgcatcatcatttgtttgtttaatcaatcgatcttggctcgtggacgatactacatgcagtcacgtcgctgtacaccatgcctgttgtctatagctcgcatgctgtttaattgcatttaccagcacaattaattatcccgatggagtcaaccgatcgatcctttccttaattttctctctattttagtctagatgtgtgcatgcaaatattgggattttttgagagaaactaccctaactgggaagttgttcgtgctgaataattgggagtttttgatcgacttaattaggtactagagatgacagatgacttggtaatattattccacgtagtaatttacatttgcagtgcaacttgaagctagttgcatcataatcgatggatcgtgcatgcgtgcctgccgaagacggcagccagtcggcatcgatcgatcgatcatcaattgggttgaatttcagacagccagaggtcggtcaggtcagaattggatgagccacttgatcgatcacttactcatttctatgctttcagatcgatctagtgcactgcatacataaggcaggcatttttttttcagacagtggatgaagctaggaagaggtccgattaactgaaaaaataatgagtaataataagtatatactaattaactacaccattcattgtattgcaggcaaatgcagttcaacttgtgttccagcaaagatgcaagtgacagtatactactacagtaagcggcagcgcactagtcgtcgtcgttggcccaaagggtcaactagatagctatagggatactgtgattcaattgtctcctcttcagggttcagacgagctagctagtcggtgaaaggaccattgttctactgaaaataagcacacggatcaatagagacggcatatatcccttccttcaaacccgatcaacaagatccatgggatttttcatactttgtttcatttatcatttgttgcaaaagaaaatgatttgtagagattctgaatttaacttgtatgccatagtttacttgcaatacctaataattaaactaatcttttgatgcagatcatatgatgagcctaggcatttaaagatgcacaaaaatcgaaagtttgactaaaagcgtatctaaaacgacaattataccccatgaggagtgtgtttggcttcaaccaagaaaaggtaagcatgtgatttgtgggaatgttgggccctagcacaatatgtttaattccatagcaattaaacatctcgcaaagcacaaaaagatcagtagccgtttagaaaaacaaacagcgaatcaatcactagaaaaaaaaacattatcctcttgtttttcaactggaatgaaccaccaacaaagaaaaaacaacattggcaactatgctctcatgaatgaaattatagttgaaacttatgcactcctacagtcctactccctccgttaggtaataagttcatttttaattccttttatttattccaaaataaattcacttttaaattaatcaatactacatcgaaatttgtaaagtaaagaaataattacattaaaagtagagtagataaagtgatgaatagttacatcttggatttaataaagatgagtattttagtcttttgttgtattagcatgtgtgaaataaataaaaagtaaacttagacctgatttagttcctaactttttttcaaactttcctagacacgtaaacttttaatttttctgtcacatcgttttaatttcaatcaaattttaaattttagcgtgaactaaacacaccactattttggaaggtagcagtgaaaaacaaagattgcaatgcaaaattgcaacatgccaatatccagttgggcacatttgacctgtctctgacctgacaaccctccttgtccatcatcatcttcttcctcccctcccctcccctccctctcatcaagggcaaaggacaaaggcgcaagctttattagctggccgcaattcaactctccacagcagcagccgcctcccgatctgggcggccactagctcaaccaatcaagcaaccaagcaagcgagctcggagctcgtcgcctcgcccatggttaccctctggaagcggaaacccaagcccaatccggagccggaggagaaggagaaggaggaggagaaggatcatcggatgtgcaagaccaagagctccgtcgccaccgcctccatggccgcctccgcctccaccgccaccaccccaagaaagcatcagcatcagcatcagcggtcgcctcgcgccacggcaacccagtactccaccacctcctcctcctccgcgccatccaccgccaccgccacctcctcctccaccgccgcctcgctccaggctctccgcgattctctccccgacctccccctcctcctcaccttccacgagctcgccgccgccaccgccaacttctcctcctcccaccgcctcgcccccaattccacctccttccgctgctccctccgcgggcactccgcggcggtgttccggcgcccgctccggcgggaccaggcgcacgtggccgcccgcctcgccgccctcggccactgccaccacgccgccatcgcgcggctcctcggcgccgccgcgtcgcccgacggctcgctcttcctcgcctacgagctcctcccggacgcgtcgccgctgtccgcgctcctccgcaaccccaacagcccgtccttcaccccgctcgcgtcgtggcagtcccgcctcaaggtcgccgccgacgtcgccgacgcgctccactacgtccacctccaggccgacaccgtccacaaccgcctctccgcctccaccgtcctcgtctccggcgacggccccaccctccgcgccaagatcgcccacttcggcgccgccgatctcgccggcgagctcctgggagaccgccgggggaggcggatcgagggcacgcgcgggtacatggcgccggagctcatcgcgggcgccgccccgtcgcggcgatccgacgtgtacgcgctcggcgtcgtgctgctggagctggtgtccgggcaggaggcggtgaggtacgagcagaacaaggcgacgggggagtacgagaggacgtcggtgatcgagagcgcggaggcggcggcggaggggggaggaggggaggcgatgcggcggtgggtggaccggaggctgagggactcgttcccggtggaggcggcggaggcgatgacggcggtggcgctgcggtgcgtggcgagggacgcggcggcgcggccggacatgtcgtgggtcgccgccaaggtgtccaagctcttcctggaggcgcaggattggtccgataagttccgcatccccaccgacatctccatctccatcgctcccaggtgaaggtgaaaccccacccacctcgccggagactcactcaccgcccaccgcacctcgccggagactgactgaccaccgccgcatcgcatgcatcctcacagtaaaaaaaaaagatgcaatttttttttacagtaaaagatgcatttttttttgacagtgtaaaggatgcttttttcttcttttgtggttttgttgttcatcaggcgatgtatatagatagatgttgctgtagttgatgtgcagcgcgattgagatcctcctatgtagatctgtgggtccatatgttagtgacaacggtacggtgcagtcgactgcagaggatcgtgatcctcacttctagtacaaatttatttattagtactgttaatgtaggagatttagcctaacagtggttgacacgatgtgattgtgagtgaggtaggaattgttaggcgaaaatgcaatcacacatgctaacatttgaaacagagcctgatgatttctggatgtacatatatactatgcgtgaatggaacatagcagtcaattggatgatgaatacttaaaatctaaactcgaaaactatcaatgtcatgaaaccaattttcctatagtttttaatggtgcccgtagaaagttttaaagacttgcaattgcatccttttttccagcgtttgatgtggacgtgtctggtaaatctggttttgaattcttcgtcgttccaacggagagaaatttgcgttgcctcctgatcatccatccctctttgatagtgcgcgtgtcgtaacaacgaatctgattctcatctcgagcaagatttttatttttctttttccgcttgcttgtcatatccacagttcatgatctcgtccagcgaacatattctgacgctttaacaacgatcgaatattagactgaagtggtaaaaggttgagaataataataataactcttactccatccgttttacaatgtaagtcattctagcatttcccatatttatattgttgttaatgaatctagacatatatatctaaatagattcattaacatcaatacaaatgtagaaaatactagaatgacttacattatgaaacagaggaagtataaaggaaggatcacaattcagcccatgctatcctctcctttttcattttaatcgatccaaaggcaagcactttgaaaccttaaactgagctttacaacgcatagaatcaaacattcattctgattagctcagatgagacgtcaggttatcagatcaacgcaataagaaacaacagtttccacaagaagaacccaccgattcttcaaccaccgaaagcacagatgcaagcagacacaagaggataaaaagggcagaaaaattcagtaatagcaggttcaatgggactacctcttgggatataactatgttagcactggtgctcactggatggaaatttggttcaaaagcattcgattctagctatttttattggagtccttctgtctgaacttttctgaatttaggggggaggacgggagaacagttttcattcacatcctctcatatgataagagatccgcatggtaaaaccaataatacattacaacaagtgttaatccaacatgaacgatgatgtacagttccatcggctggaaagttgtacacatttctatctgcttcgctgtttatggacccgagctgtaggcgaaaatgccggttagtcgcagccgctgtagaagacatgcgccagcagatcagatcacagctttgctcatcgtcaccaccctctcagtgactaatcaaacaggggagaaatggaggttagatacatttcagcattagtgtcattcatttattcaagaatatattgttgatatttcaagaatgtagataattctaatgtaatgcagaattatgctcttgtactagttttttacatctgatctagcctcaaaaagtggacctgtacttacctaaccaacttcctatctttgtattgatactgccacgcgcgcttagtgggggacaaaacaaagtaggtcaaaggcaatagggtgtaacatcagatatgggttgaactgttctgtgaggtcaatgtctaacaccaacttcgtcctctatgattacaacatgcattgccatggcatacactggaaatgtaatctatcgaggaagaaatcgaattgtctgaatgtattatatagcaacctcgtgaatttttcatacaaccagaaacaaataggatatcaccaaaaatggttggcgtgcgaatttcaattgtaagagctaataattagtattgctgagcattgtatttctatggcaatttaatcagagtggaagtcaaattgttggtaaagtaggcagttgcaggagataagcttaagcacacaatcacctcagccaactgaaacctgccacttcattctgttaaaaaaaagagcaataagtgccctaacttctggaattatcaagtgcacaggaattcctgagcaggtttggtggtcagacaagtgctcagttaataatattacattgagtgcaaatctttctttaaaatgttccatgaacgtcacgctaccagttcaaatcattttcacattttttaaaaaatatgaaaataaatcgaaacggaacaactatacagagcaacagtggcatgtagagagcaaatatcagcatgtcccttttttttggaagggacactgcagggaatcgctatatattgtataaataataaaaatatctgtcacttgcatactactagttatgcataccttgaagccggatttggaattcgtggaaccacccaacattttcctcgctggttttagtatttgaaaagagcacatcagtgtatcatctacactcatcatggcaccagcattatcaaattctccacagtaattaggggccgagaatattgttacaagttggcggttagcaaagaactcgtacccatcttcgacaacctgaattccaacaaggcaagaataactgataaatcaattcacttggtaagaaaaataaaaaggtcaggtaattgtgagcatggggcacctgatgggctcgacagatgaggtctaaatcatgcttctcaagaaattcagacactttgtctggcccgaatgtatatgagacacctcgatcattcatagcccacccttgtgcgtcattggatggatcggaccaaaggagatcacaaagtaacccagtatcaggcacatccgtggggcggttgaggttgagtatttgatccagcttattcaactctggagaaagacctccgtgcatacaaagaatcttttcatctatcaatgctgccactggtaagcagttaaaacagtcagtaaaagtcttccagagttttacactgaatctgcgcttgcactcgtcataaaatccatagatgcggttgaccgatgcacattcatggttgcctctgagtaggaagaagttttcagggtacttgatcttataagccaaaagaaggcatatcgtctcaaggctttgctttccccggtccacataatcgcccaagaagagatagttggactgaggtggatacccaccataatcaaacagcctcaggagatcagaatactgtccatgaacatcacctgatcagaagaaattatgcaagattaataaatttgatgacgtgttattaaagctgcttaaggtttgctcacaacaaatattggaattcataaaaaaaatgaatgtcaactgctgccacattttgctcaaatgttattgatttgtgagaactattgtttctcatggaatataatggcaagatgccatgaggaaaaagaatacagccttaacatctatgatcaaagattcctcttaattcatactaacacaaaatcctgaatggaacacaacctaaagatattggcatatttctatcaacaggacccagcaagaaacctggggaaaaaattgaagacttctctctctctcccttttttgagatgagaaaaaacttgcaatatcaggctggtgtacccagaccgccagatattgagatacattaaatgtgattgtatcaggtatgatcaattcaccataaactatagcggtcaaaagtttcctagtagcagcttgaaagtctatctttgatctttctatcaacaaatcgcctcacaaaatagcagctttcaatcagcaaatatagtcggtatggttcagttgtactgaaccactgagaaatctagatataaccatcgtctgcctcacggagtataagctttctatgagcaaacatatagtcggaaatactgaatcacatgattcattaggaagtatgtggtaaacctctgttcgagtcgataaccggatcatcaagcgacaaaacacctaaaaagctggataatatctggctatcaatcaaaagatcgggtatagtacattaagcaagtgcatccaaacagcacgacgcagtcacttgctacccgttgaccaaccaagcaaatccccaagatgacattttcgagggcagccaacatcaaagatattgctcacgcgtgacaagaaacagggaaattaccgcagattttgatgggggcctcgagctcgagcaggttgggctgattcaggaagatctccttggaggttgcgcagagctgcttaatctccgactccgaaagctgcgcgttcttccccggcttcagattcttcacctcgataagcctccggatgatgtcgtccagcaacaccggatccatccccttctctccaagttcttgaactctcctccctctcctctcgaaacttctcaaaaacgcacgagcagtaacagttaagaaaaaagaacagacttcacagcaagaaactcgagcagagatcgaagaaaaatcttgcttgctttgctctccgtaagaggggattggagaaggctgaggcggcctctcgttttgcgaccagtgtgtatttgggggggagggagagatgaaaggtagtaccttttcttggtcttcttctcctcctcctttatcccctaatgttctaggatgctctcttgttcttgttcttggagatggaggagattgtttggtgggtttttggaggggattcggattggattttttgcttgggctctctgatttcttgttcttggcattggtatgggtctctctctctttctctctcctgcctgtgccaattccccaaagacttgtattggactttggaataaaagcataagctttttttgtatcaaaccccctgagtattagacatactatgtatgggtccttgctccttggttggagattttaggaacatttttgtggggttacttctatttctctttcctttcattttctcccttgtacatctgactcttttttgttgttgtttttatgcactctgaattttgtttgtttgtatgaaaagtgtggatgtttttggatggatggaagatggccaaagggcagagtaagtgcaatgctgatatttgtagttgtagaaaaaaatagcattggaagtatttatgagttggggagactttttcttacttcctttcactgcatttgtcatatcaaaaatggtgattgtaaccgtaataatggcgtgagcttcacacggattggtacaaaattcatgactgtgtgttttctaccgtactaattgttgaagatcataaaaacaacatgtttatcttcaaaagataaatacaacatgtaccaacaaatgaacttatttctacgctcctggatattcatcgagaaaatacgcgcatagtacaaaatttgtttccacaagacaacgtgtggcgattaagaaaaaaaactagagtcaaataaatacaacatgtaccaacaaataatcgaagctcactttatagagtgtcaaattataggatctttccttaaactagtaggcgagctagcattataatactgctaaactgtgaatcaactgttgttttctacctaccacagtgaacacagtgattaaattagctcacatttgcacttatccaatcctagtaagtagtgacatttgttactatgtcgctaacccagtgatgagtgaaccaaatcactctttcagtgatgcaagctttgtgtttgtatgcttcctgatgttgtctttggacacttttgatttacctaatctcttggtgctttcaacaacaagtaggtgcttactgatcatggcgcacaatatgcataggtagaatccaatagaattttgggtggtggatggcggcttcctccttgtcatccacccttcctttggaatctttcagacaagaggacgatcagcttgccatggaaaagtcctgtcagtgaatggcccccactgatcattggctgcagtgaactgaatggttaaaccttttttttttaattaaggaggcccagggtattatgtaccggattattgcgtgaattatctacttaggtatagagataaattaaacctttttttttaaaaaagaacttaacaaataggtctaaaatactacctccattccaaaatgtttgacgctgttgactttttaaaaaatatttgaccgttcgtcttattcaaaaaatttaagtaattattaatttttttctatcatttaatttattgttaaatatacttttatgtatacatatagttttacacatatcataaaagtttttgaataaaatgaacggtcaaacatgtttaaaaaagtcaacggtgtcaaacatttagggaaggagggagtaagtggtactccctccgtagttataagatgttttgactttggttaaagtcaaataactttaaatttaactaaacttatagacaaatatagtaatatttataatatcaaattagtttcattaaatcaataattgaatatattttcataataaatttgtcttgtgttgaaaatattattattattttctacaaacttagttaagtttgaagcagtttgactttgattaaagtcaaaacgttttataacgtgaaacggatggattattaagtattaacaacgtagtagaagagagtttaagcgtacaacaaataatctagtgaaaaaatagttgagattagcggcaccagcgtcgtcaaagctggctgctcaatttcagaagagtcttctcctgtcttcgcatggattcagacgatatctatgcatactaatcatgcgaaggtcattgacacgggtttcattcttcagaaacacgagcagaacgcgaaagtaatgtgatttttagtttattactgtgtgctgagacagcgtggtttctgtagatttcaaggagtttagaggatgcatctgctaatataattttctgcagttaaggagtagctggctgatctgcacgcatgtatattgcttccggcccagatgcttaatcccaattcgctgctctgacattttactaatcccttcgttgttggtgacaaccaactggctatatatatgcatgattctatctggattctcttcatattcttataataatgttgagtcctcattatattagtgaccctgctctgcaaaatgtaagcagaatatatatgatcgtggcaagaagtaaatcgtccaaatagattaatggatgcatcatgcatgagtggatcgaaggaaaattatatgtgcatctacctcttcttctgaagaaggcaaaatcttgtagcgtatttgattgtttaagcaaagtgaccaggccaagtcccaaatctgaagaaaaatataccatcatccagaatcagatcagaaaaactatacgtatcgaataaaccatagtgtaaaaatatagttttattttccttggagaatatgaaattcatgactaatgccaccgaaaagtagtatactactttgcctgcaataccattgagcccactgaacaaatcaagaatcgatatttttttaagacaaaatagaagtcagagtatgatgtgagatcacacatgttctcaataccacgacaaaaaagtggatattttccagctgtacttcaaagtccccgaactgaaagatgcatctgctcactgtcgcaaataaaattcagagatcgacaaaacatcccaagctaagctggaggaagctgatcaggagatggcagaaactctgtccaatataagcaaccaccaatcagtagcttggcgaatgcttcatcttcacatagcacaagctgccatgtagtcttctctgcgatccatgcaaggcagatgcaaggcagcggcggcaatggcagaagttgatctcagtggagaggaagacgacggcaagattgcccggcaaaggccctatttagtttccaacttttttcttcgaacttctaacttttccgtcacatcgaactttcatacacacaaacttctaacttttctatcacatcgttctaattttttcaaacttccaattttgtcgtggatctaaacatagccaaaattggaagacaacgacaagattgcccggcaaaattaatggtcaatggaggcaaggccggagggagttgggttggtttctttcaggtgcgtctgatcttagatcttcagtaacttggttttagtgctagtcactgtccgatgatctgaaggagattatacgcaaccagtttcaactaatatcatgaactggccattatttctcctgatccttcttggatgcaaaatcaaaggttgcttgtctgaatttgaactccaattgagcatcacgcatcaattcatgaatatattcattcttgcttgatcctgattctgatcatccgtagcaactggcgcaacatgaagtgcagactgctttactatcaaccattcttttagataaggaagctttttcttaaaaaaaaactcagacaattacatcaatatgatagaaccgtgctgagatctcttatagcctctgcataactgaggtgcataactgatgcacacaaacacacataataaacgtttattacaaatgaagaagcaggaaatgcggaccatcaatcctcagactacattgccaccaatatcccttggtaaaaacagtttctgaccacctgcagactatcaaccatggcgctctactccaccgacagcaagaaggttccacgagcaagacaagagaagcttcagttctctagtactggagagacgtagtgccctcaagctctcctgcttcccattcttggagctgcaaatgtcgtgttgcaagagtactactctagtgatgatgaactggaagacagcaacgtccgaacaacagcaagagcaacaggtggaccactactgcacaagcatattgtaccttcagctgaatcagaaccaaaatctcccggccacgcatcctacaaatctgtaaatcagcgatcgcgatgtgcaccggaactcgcagtctgaaaacaacatctcagtttatatcatcgaagcctgaattcctgcatcatctgttcgtccgtttcctgatgcaaacaaagttcaggcatcagagggtgtagtacatatttggcagcatcttgttgattactagtgcttgttggacttgtgtctggttcatttatgcataattagaccttatctgggtcttaacctaaatggagacatggagtacacaccataattgaagtattgagtcacacataattgaacgaaggtggcctgaaatgtacagattcttatgtaaagcagcagcagacaggggatgttaagtcagtccttcagtcagtcagtcaccgtgccccagacgaaaaggaatgcacgtactgacaagaccaaaagcaagcaagcgtcagattagttgactagcaagctactcctagtacaggttagacaagaaacagaccaagaaagaaattaccactactaaagcctaacagtacaaggaagcagcaagcgtaggccggccgggaacaccggcggcgtgcggcatccgtcgcactcgcacatgaaaaaaaagggggaagcaaaagctcacctccaaagccgcgttcctgtcactcggccacacttcaatcgcatccaaaacatcaagccgccatcaccaccagtgccgtgatcatcatacacagcatctccatctctgcagggagtgtgtgcaaacctgcaagctgctgcaaattaaggatagctgtgtgctgacagttcattttccttgtgttgtgctgttgtgcaagcaactattgctcctactgctgctgtcctgctcttgctcttgctctgcaggttgggtttctttccttcctcaatttctttcacaactccactgcattttccaacctgatcgggtgctgccttttcattcttccctcctacctcgttggccactacattgagcatcaccatttggtctcaccattcatacctgaaaaccagtatatatgttgcatcagcagcatcatcaaacctggtctatctagctcagtagctcacctgcttgtgtgcttaagctcgtgtttgcagcaaaccatggatgcagacagggaccccatcttcccggtgcaacagatgccatcactgctgttcccgccaccgccgccacggccattggcactcgactccacttcttcagcatcttcttcttttgtgcctcaccatccatccatcacgagcttcccaatactggtgctcaccgtcctgggcatcctcaccacctccgtcctcctgctcacctactacatctttgtcatccgctgctgcctcaactggaacagcagcagctcctccgacacgcggacggctggcctcatctcccgccgtcgacgcggtgccgcctccagcagcctcccggcagtggccgagccgcgtgggctggaggaggcggccatccaatcattgccggcgttcaggtacaggaaggccatcaaggacactactgctgattccagcgagtgtgcagtgtgtatcagtgagttccaagaagaggagagggtcaggctcctgcccagctgcctccatgtcttccatgttgactgcatcgacacttggctccagggcaacgccaactgtccactctgcagggcagccatagccaccaacgacagccagcttccattggatcagttcgtgagacctgaggtggtagtcattcaggtgatcactggcgcggaagaagaaggtgcacaagcaccacagcaggaggccaatacggcagcttctgatcctgcagtagatgctactagtacaaatcaacaggtcagtagtaagaagacgaagaaccagaatgcatggcatgtcagcatcagtaagggagatgagtgcattgcagtgaggagggacagaaatgttcttccattgaggaggtccttctccatggactcactgggtggtgctggagaggtgcatttgcagattcagaatattctgcagaggagcacccacttccacagggatatcagtgacagcagcagcagcagcactggaacattgtagggattactatgcctgcacattctatggccatgttctatgcgaattcttttggtggtcttgttcaccaatttttcttttctttttctgcaaaatgcaatattacatgtcaatttttctctaatggacacctataacatggtttgtgtgtgtccgaaattccagacttcagacagtagaatggcaagttctttctgtgaaacattcgtgcaaaacaatgtaagttgctcctactgctactgtattttccagctcctctgaatctgcccaagcttcctcttcaggcactgatacatgcatgtgatccccaaatgatcatatacgatatggtgagtcaaattcaacaatgagaaagggaaggagcgagaatatgccaaataaatatataaataaataaatcaagttttgaattgttaaataactagtgaaagtactcagaagaaagcgaatcagctgatgacaggataaatgtgttaccaatcctagaaggtgtaacttcaggcagtcaggcaaaacaaaagaaaataaaaacatgaactgaatggggaaaggtagacacctttcaaaactctgtaatccaatgtctcaccaaaaccttcttataataatctaacattgaaatctgtgtcttagatgacatcatagcttgacaaatcagattttccttgtcgcaggaaaatgtcagttcaccaaccattgaaaaggtcatattatatatctctaaaaggttcctgtcatgctgaaaaggtgtgtttctgattacttttgatatactgttaggtcttctaagtggcacaaaaggatgtcagtgcgtaacaagtcaataaggatcatacaataggtagtttcacagccaaaatttcttgtactactaaacaacatatcataatcatatattgatagaaaaactgatgcgtacaatactttgaaattattgttgagcaactctggtagaatcagaatcaacctccttttccagaggttcaggcaatgcaattgctgaattttcaggcgataggcatgaaagagcctttatctttatctgctcatagagacgaatagcttccttgagctcgtccctagcactgggaccatggtttcgccaagaatccaccactcgcttttggaactccatagccagagcatagctgcatttgaggcaaaatgatttttttttcattagagagaagcgcatagtacttcatacattaatacagcatgtggaaagagctttcttagtttccttaatttttcccattcaaaaaatatcaatctagtctattttggagaagcagatctgaatagtgtgcttacaatatcagccagccattatgttgcgtgcgtacttaatgcatatgaaacaaagcaatcagtaatttccctttccctctaatgatgtaatgcgagtatgcaacagtatgcagggagcacaattacatactctgtaatttcaaacgcagtagcataccatgtataaaaagcatttcttgcaataattgcaaaaatgcaacatatggtcatcctgaaaactagctaaagaacaagcattgcaaaaacaaactagcttgataggtaacatgcagattattgtagctcatttaatcttctgcctggttatattagacatgatactagcaaatatcagaattgtttcatccaaaatttgtctgttcagtattttttttgtaacattttttatgtgtctttgaatgaatggaatgaagttgtgaaatcataccttcccattgcgttgtatgcattggcaaggctctggcaggcctctatggtatctgaatggtgcggccccaaggaaacatccatgacttcctttgcaagcgcaaacatctgcgcagcagactgtggtcggccgatctccatatatgcagcccccaaattgttatacacataccctaccccgtaatgctttggtccaaagctgtccttcatcctctccactgcatcctccaagtatgggacagcctccgacaccttccctgtcagaagcaatagccacccaatccgagccgcaacattcccttccatgtgttgtgcctgaggtatcctctcaagcatccccaagctcctcttcagcaatgatatcgctttgtcaaactcattcaccatctcatacagtgaggatacctccacatatgcttcggccaccttgtctggtgcagccaattccttcttctccagtatgtcacaagcaatctccaagcacctctttgtatcaccggccttctcctggttagcaagagcctttgccatagatataaacactagagctcgtatctcgctatccttctccacctgcttagagacattcctcaacacagtaacggcctcgtcgcacttgcccaaagcgatcttgatgttcgccgcatcaatctccgcgtgcaggagctcgtcgccagccacgccccagctcttcatcaccttctgtgacatctcattctgctgcagggcctgctcatgctgctccaggccggtgtatatcaccccaagcagccgcctatcatgcgcaacctccaccgaatttttgcctagcgtcgactgatgcagttcgagcgccttctcgcacaatgggagcgcctctttgaaatctagcacggtggagtacgcctccgcaaggtcccggtacgcggcgccgagctcccggctacccggcggcaggatggactccttgaggtcaaggcacgcacgcatgtcagctagggcctcctcccgccgccccagcgccgtcttcacgttggccagctgcaggcgcaccgcgtgcgccacgggcctcacgtcgaacccttgagcgtcgtcgtcaccagaggcggcggcggcggaggaggaggaggggaggagtggggagacgaggcggagggagcgggtgaggaaggagagtgcgtcgtggaagcgggagaggtcgaaggaggcggagccggcgaggtggagggccatggcgagcgagacggcatcggagtgggaggccgtcgtcgaggtggcggagttaggggtggcctcgaggatgccgagggatcggagggcgagggcgaggacgcgggaggggtcggcagcgccggaggcctcgaggtgctggccgagcttgatgcaggcgagggcgaggcgcttgtcggagggcggcatgacggcctcgaggcgggagaaggcggcgagcaggtccttggtccccttcgccgcctcgaaggcctcctccgcctcctccgcaacggccgcggcggcggcggccgcggaggcggggactggaggcggcgggagctgggagaagtggcggcggggcgggaggaggagagggtttggggttttgggtgtggggatcggaacgggagctcggagccgtggccggaggaggagggaggcggctcggcgtagagccatggcgagccggcgatctattggaagttcgcggcggcggcggtggtggcggctaccggcggcgagggagggagagggtggtttacgtggatgagaggagagtgtgaagggttggagatttgatgggccttaggtttagttatatgggcctaaattccggcccaactatatgaggccttgatgatctagtgggctacttgttcggaggcgtggattggcctaaatctaggcccaaccgaaagaggccgtgatgatctagtgggatgcttgttgggctgggcttacccactctgctagccaggagaccagtgagactgtgagagtacttctctcctttcatttttcaaaaaaatattttttttctctactcttgttttattattttctatttttctatgctgtttttctatagatggtaacttgtacttctatgttattaaaaatatctgcgatggaaggagaaaatgagatgtgatgatattggcatctcttagctgggcagcaccactgaaagctcgaagtcatgcatgatgatgcgtacgtgaaggctgaagcgaacgaactttgacaaaaacacaacctttccagccaattgtggttgcctaacctgaacatgacgtgctctattgacaacaacgaccatctgtccatggctcactggccactgcaactagttgctaaattggagtagcaatattaagcaaaaaagataatgtcattttacatccaatgataatgggctggatgccattttacacgctgctgaaatttaacctgaacaaactgatatatggttgtgagttgtgaacattagtatcaggaaatggatggttgaactaaccgatgaagtggacaaagcaaactctgccgaatcgatcaaaggtcaatactcaataccgaagaacattctgagaattttcatttcagcaccagatttactcggttaaacaatacacattcctcaccaaaccatcgtttctctcgtgtctccatcgccgtcggtaaattcagcacaagctcactattaatgcttaaaagcaaaaaggagattcagatgcagtatacagccgaatattcagtgtcttttttataacagaagttgatcgaagcaggccttatcctgctccatctctgaaaaaaatgtagaatagattacagcttatctgattatttcatagattgacaattgcaaattcacaatcgcttatgtgatcgatcaacgattgcaatccaacagctagcattacagaatcacatccaaactgaacaaattctgaactctgcaacaattcgtagcagcaagaaagcaagaaatgcaacaagctgttcgtcactcacagctgcttcagtccgtcggcgaagcatgagctgaaccgcgccatgtcggcctccggcagcgccacgccaatctcgatgccgccgtggccgtcgcgcgcctccgccatggacaccgtgccgggcgtcttgtcgatggacaggagctccaccttcgccggccggcccagcccgaagtcggtgtcgtacacgccgtaccgcggcgagccgccgatggacatcggccggtgcggcatcagcgacacgatcttctggaaccacccgtcggcgccgtccagcacgccgtcgtcgagccccctgatggccgcgccgatggccaccgccgccgtcaccacgccgtcggcgccgctgccgagcaggccggccgtgtcgacctccacgaagcaagggcggaggcagttgccgaggtactcctgcggcaccggcggggtcaggcggcggcggcattccaccgagaacagcaggtgcgcgcgctccctggcggcggaggtggcgtcgactcgcgctaggcaggtccacgcgtacgcgcacgccacggtgaaggccgagcagtggacgccgccgccgccgctcgccgtgacgcgctgcttgagcttgtcgatgctgtcgcgggtgagcgtgaacgacgccatgaacagcttcggcggcggcccggacggcggtggcgggggtggcccgctgttcgccagctgccgcatttgatcgagcgtcttggctgcaaggccgtcgggatcggcgaccacgccacggtccaagaacggcggcggcggcggcggcacagcatcgacgtccccaccggaagccacccggcaattggccgcccaggtcttgacgaagtgcatgaagctggaatcgtcgcaggccacatggtggatggacacgccgacggcgagccccttcccggggaaaaccgtcacctgcaccgccgcgagctcggagctcccctcctccgggcgcgggagccgcggcaccagagagtacagcctcccaacatccatcgggccgccgccggcgagctcctcgaagtcgtcgccgctctcggcgacggtgagctcgacgcggtcggcatccccacccgtggagcagaactcgtaccctccgcctccgccgccgctagaacacggccggacgcggccaagaagcgggtagaagcggtgcagcgcggcggagagcgaggaggcgagggaggggaggaggtgggcggcgaggtgttcgacggcgtgcgggtaggtgtagaggaagacgcgctccaccgggccggtgaagatccacggcacgtcgaagaaggtcagcgggagcacgccgccgtccgccggaggggaggccgccaccgtcagcttgtcgacaaccttggtcgccatgacaatttgccgctgcttcttcttcccctgcagagaattcttggtagaagagatcaagaggagaggtgggcgaagatgagaattcgtgagatttggggaggaatcaggattttttttttcagatccaccaaacgcatggcactggtggttgcaagtgtggcagaaaaatgctctctttgtcactctctattctttattgccatcatgttagatccttttcctttcctactgctttctgatcgaagttggaggaggttcctactactatccaatagcacaagaaaacattgtcagtgaatactgcagaaacagttaaagaagcattatttatcagtaaaaagcattatttgatccagtgaagaaaaagtgatggcaatctggagcctgtgtacactggaaatgagctcatcagatgaaatcaatgacaaaatgttaatctttatactctgactttgcagttgtaacttgcaagtcttttttttttcaaggttccacttaatcacatcggtagtataactgattatccggactgggatccacacaaaagcaggaaaattaggaagagttaggtatgcgattaaaaaaaagttggcaaattagtgtcggcgcatctgcctaccaagtattatcaagggatgatatctttggcattggaagtcacctctttgattctctaatctggaccgcgcacaaaagtttcaagaaaaacaagtatctcaaacttgtctgctgatcacataatattgaagaagtaagacggatggaaatactagctcttaaccttgactgcacactgaaaacctgtaagaaaatactaccagatgggcgtatatgatagcaaccaactgattcagtcaatggccatcagttcctcggagtgaaaaaatgcaatgtttagtcaactgcctaatggaaattcaggcaataaccatgttcataaacagtatgatcagacaactagccaaacagcaacaacaggtataataataagcttataacatcaaaacgcaatttttaccttctgctttccttgataacagatgcagcaataaagatgatttaagctgacataagaacttatttttccgccttaaagtgggcttgcacgttttaggcctaatccgattacatttgggccttaatggtctttcacttcttggaccaaagcctattacatttttgcttacaccacggcaaggcattctcttttttagggcttaaacgttttatacaacacttcagtaaagtactccgtactccaatattatttgcagtcaataaaactattattccaattaacaacatagcaagctcttcaagtggagttaaattaatttttaaaaaagattgaactgaaatgatggagaggcgccacaagcacaatttccaaggcatctgcttgatcagattccatttcattcctctcttttacaactttttttttgtgtgtccaagcacaacagacattggcttgggagatgatggatagggccaaagtttagcatattttgactcctccaattgctacatcttcatgccaaagaccatcctaatcctcttttcatccaagactgcaagtctgcaacaaagcaactcaacacacaatgcaagcactagttttcccttttcattttggtttctttatggttagggattagtgctaaagcagctgcttgattagtggggtctaatctaattactctcaagtgccataattggcatgctttagttttatgcacaactttgtttgaccaatgaccagcttcttgaccagttcaatcaaacaaacacaacaatgcttatggagtacatatatatatgtgatggaaagactacaaaaaacacaaaggaccaaggcaaagaaaaataatgaaatttccttcaactttaacagacaacccttgcatatttaaatgtctgtttctcgggccattgaccaataaaccaggcaattaaatatggcaaacattttgttttctctggtttgcaaagaacacaaagaaacaagaactgaacttgtgaggtgaagctagtgattccaaggcactgataagaacaaaacttgagctagtgctagggccatctaatcgctgattactgaccagtacttagtatcctaggctacctaaccatgtgtgtgtagatcatcttatacattacccacattaatcacgcgttaaatctacggctttgctccaatcgataaagacgagtgatcacaaaagtcactggcctataccaattattaattcaactgcgtttgcttgcatttgtgttcagtcagatgcattcttcttcaggttgtagcagcgccctaaattaactaaacaatgagcttctatatgtgcagggttttgtttgcttgcagcagtatttgatgaccttttcttagataattttaagtgtttgatgacctgacaggttagctgctcattggctagatattgctattagcttctagtatcttctgaccttaactttttagccttttgtaatggattcagtgaacatgtctgaattaaattgcagagtcccaagatgctagtacttctacaaacctactagtagtactgttcttatctgatcactaaattaaacaaacatgtactattaatatactagtgtatttctgtctcaattattgcaatgggattgccatcccacaggattactggtactatactggaattaacatttcttcagttctttcaaaatggcagtgtgattagtgctaagttctatttgatttaacctatctagcatagcaacatggatgtattatagcaggattaactagttgcatgcagtagttaactttggtcaaccatcaaagcacactcaattttgcaaagtaattaatcaaccattgggatcaggacctttcaccgtgtatctgttcatgtgcatgcgtgctaaggtcaacatttaagtagaacatactccagtaattaaaattggaacggaaagtaaacggtggtagctgcggctgatgagttcatacttgcccttaatcaaggggacaatccttatgcatggcatgaaaaaaaactaggattatcagcagcagtctaggacatatatatatatatatacaaaatgattttagggtctctagagaagaaaaacttggtggcaactcaaagttatgtgataaatgtttcttcaactttcggcactctcaagttatattactaacttctagtagcatagtttctcataaaaaaaaaacaaaatttataattattttcagtttacttcgaccgttacaatagtaatatttctccttaaaagaaggcgattgttgatgggagtgtttctgcaacaagggacatgaacacctttttgcacatcaaccatggctgagaaacattttaaatcttatcaagaacatgttggacaggacatgaagtagtgagaatctgcttccataacaagaacaatataggacttgagaagtttctggctcatgcagtagtaacaataatgtctcttaaaaaaagacacttgctgatgctggctgcacatatatgtttctgcagcaagacacatgatcgccttttatactgaaatcaggagaatgtctctaaatcttatatgaaacaagttgaactggaaattattataaaaactagggatagatcagaaaatttttaatgcagttttacactagttcatcgcctgagacacatatgaaatgacacacatagatactgaattcagaaccttgtttcatctgtctcgatttaacctagctaaacactcaaacaaattttggaaataagaagattgcaccaactaggtcagcaagattatacttggacatgcatgcatggccagggtccagtgatgtgtgatgtcattaccaagaccttgttgcaagaagctattagtgttatttagtagtactacgtactaatcatcatcatgaagcagactaattgcttcactatgacgttgcactgataaaaaagttcagtagtacacaggctaaatttttgcttgtccactctctaactcctgcatgcaaagcgttgcattgtttgatttttctttctactgagagtagttggaggttgatctcatcatcgcctgggccagatactggagctcgccggcgtccaccgccttggagcaatgctgctgcatctgcacggcggcgacgtcgtccttgaagccggccgccatgagctccggcagcagcgcgccgccgccgccgaagcagtcgtcgagggcgccgccgggcggccttctcgccatgtcctgccggagtagcgcgctgatgctgccgctgtccggccagctcaccggagagtgcgagctgctctggatgccgcacgccagctgcgccctcgcctgcatcagctgcgcttgcaggatcgcgacctgtatgtagcatcgatcgaatcagtcacaaatccgagaggcgatcgatcgatcgatcgagcagcgacgagatcatctcattctcatccatgaaatgaaatagtacctgctgctggagggcgaagatttgggcgacgcagccatagacggggtcgcggagcctggcctgggcctcgtaggtgatggtgacgacggcctcgcagcggtcggcgacggggaggtgggagaggagcttggaggcgttgctggcgccgaacaccttgtggatcgccgcgaacctcgccgccccttgctccgagctgaagtagggcgcgaacacgcactccggcacgcaccgccgccgcaagaacttgcacgcgccgcacggcgacccggctcccgtccccgccgcggcagcggcagcgccggcagccgtagcaccagccataccgatcaagatcgagcaagaaaatgaatcgatcactctagctacgtgtgcttctctccaagtgtagtgtgtggtgtagtgtagtgtaggtaggttagctgctagtagcggtgcaacttgagatggaggaggtggatttataagaggaggaaggagaggagaggaggaagaagagaggaggacaggtagggtagggtgtctggttcgaggggagcaaacgtgttaatgctgcgttgaataagaaggccaacgtcctctgccttactacgactcacttgctaattaacctgcagcttaaactaatcaattctactactgtatatatatcaccttcagaaaaaagaaagaaatattagtgtacaacatggccatgtgatttgtatagtcttccttaattgatcagttgtcatggagcagataatgactatatatataaataatattggtacgtatgtactagtaatataatctgatcttcattgaaaatatgcagaaacggtccagtttaatttctacactttgcttaccaccaacatcttcatgaacattgaagtttaatttgcaggtgaaagataatcactagaatgaacatatcctatatatgccctcagaaaggatactagctagctagattaattgccgtggaatacttatactgaaccttgataatttttcagtagtactgttggatttgtccagtacaagaatgagaaggaaataaaaaacttactccctttgttctgttataattgtagagcctgttcactttgatgtcaaaaaaaaaccttatcaaatttttgcattaccaaaattttggcatagcaggatttcttatatagttaccaaaatttgacagcaaactaaatgtagccactttttttgcgactttacctaaatttgataagattgaaaatggcatcaaagtgaacaggcccgtagtttagttgtgggtttctatgttatacgtttgactattcgttttatttaatttattttatgaatagtattttattgttattagataaaaaatgaatagtactttatgcgtaatttatatttttaatttttttaaataagatggacggttaaatgttatataccgaaacccacagggagcctgagagggagcaatacattttggatttggttcaggtgcagtccctagtgtgactgcaacttaattagtcacactaggaccatccaagttgcatctaagggctgagatccttagagcactgttcacgcgtaaaaaatatttcacagctactgtagcgatggtactatagcagttgatctacacccttgatctaaaaaatgaatggatgagataatgtgccgtcactgacttgcagttctagcagtgactgcatttgatctcaatccgtacattttgtttgcagagaaactacattttcagtagaggagatccagtcaagagtgaggcatgaaccaatcaatcaatgcagctaaattaaaattatactatcaattgaagtgagttgagtgtgcacgtacgtaggcgggctgcataaagaaaccatttcgcgccgaacagccgcaccttgcacggtccgtctccatcgcctctctcgctgctcctcctcgtcgtcgtcttcttcttctctcgaccacctgccattggatttatccggccttctctcctactataggattattgttattatatgtactaatccaacctaatcttcttaattctcctttggattcttccctttgcttgctatgcttttgcttctcttctccgcgtctcgttttctgatcatcctgtcatgttgttgctgctttatttcgatcttcttttctttctttcttcttccaagcagttattgtcccctatctccttaaccgcattctagcttacttctccttaatttctgaggctacagagtagtatttatgatatgcaactgtcgattgactatctgaatgatgcagacttcgagtatatgatcttggttcttgtccatgaaaaaggtagtatcagagtacacatgcatgcagagaaagtataatgcctgcttggtcactggctgtttgaccgtattaaccaaaactatacgcaacttacgtagaatgtatcgtgtgctcgtgcagattacgagacgacgacgaaaagagattggcacgccacacgtgcaaacggttgcacgagcaacgggacttatggagactcattcatcatccatcccaatgggagtttttttttttctttcttctcctctcattcagctactacaagtttacaagataggtgagatcacaagaatggagatccatcaatgacaacgtacccatgtacatagccagccagctgcccagctatatcatcaaagtataaatcgcattcttgccatcaaaattccaagcaattgcatcatccgtatatgtcacatactcacaacccatgctgatgtacacaacatctcaaaatgaatgccgtcgttgtggaataatcatcgagtttcttgcagtttcttccgctgagcgacctcacaccagtgtacatcagcagacagcaaccttacctcgtagttttagccgagccactgagtggcgcgccgttcaccgccaccgcctacagcatggcggatgctgatcttctcatgggagtacttctcctggaggtactcgaacgcgttgacatcaagcttcccgctcaccgacttgccctgcttccgcctgatctgctgctccttgatcgagttccacagcttcgtgatggcgtccctctgctgcgtcgtgaaccggttcatgttgtcgtaggcgtgcttcgcaaagatgtcaatggcggtctgtgtcctgataacataaaaaaggagaattagaacacaaaattgttgaatatgtgttgataacataaaaaaaaggagaatttagaataggaaattgtagtgtatgtgccgctaacagcataaccacatgatgttctatctcaagagaactcaccacggaatcctatagcgccgagcagctatttctagacatttcaggagggcttctcgttgtgacttcagaaatctctttgattcatcctcatctgctttcctatttagagcggcgaccgtcttctctcgagccttttcagacttctttgacttgtgctcaagtagaccatccaaaccaaaaggatcagaggattcctcacttgagttggaggctgcagcatgagtgctatcatctggcaacgagttggatgccgcagcttgcgggttatcatctgtgttattactttcaacagctgctagagctgctgcttcatcattgtcatcatccactgttgtgattggcagggctgagatggcatctttgatcttccctacagcctttgagaactacaaaacagtatcaagtacgttagtcaagcactcaaatcacaagctgtgtcatagacatgagcccagaaacaataataatgcatttttcacatttgatagagaaaataagcagcgcaggcaccaccacaatacactcaccacaaaactgtcatccgtaaaaagatcatttgccaccactgcatgcagcacccatatatcaaactgatttttctgttgttggttgaaacactgcaaatccaccacaagttataagtacaagatacaatggtataatggaactgcataaaacagagaacactaagacttaataaaaatcttcacctctgttacaccctgggctgcattaaacaaagcctggtaatcagcacgtacagaaggctcattacaagctcctggtgaagacattgcagcctctaatatagcaaagaagtgactgattgtccctggcttgacactcccagcctcaataagctgtagagctagttttgatgccttgctgaattttgaaggattccgtatgtgtgaagttatcttgtgcatagcatcaatgacttgcgtttctgaggcatcaacagtagttctaaacctaagtcgcttctcaggagctacaagaaaaaaataatgaatattagaagtttagaacatgagcatgaagcaagtaaaatatctctgctgttgttataggaatatagcgagactgtaaaagtcgctcgcaattaaaaaaaatcatgtggaaaataattggatgataaaaaaccttcagatataaggagtcattacaactttcaatcacccataaatcttgtcagcaggactagatattcagtgctagcacactaacgaaactaacgaaactagagttagtagtaaaacatgatggcattttgcagatggaagagttgtcatataagccaaacttataagagatgtcaccagattctgttaacgttccaacttccaatcaacacataacatagcgaaacattaatctttgcaagacacaatctcgcaaacaaagcacaaaaaatcccagtgaattacctggtggtgataatatcaacaatactcactatattcccaattgagttactccaagggaccaaggcagcagtaaaccctggcactaagatttttttaaaaaagggcaagcaaagcttatctgaaccagatcaaatgtgtataatcttcataactgaactaatttaacatcttctgttttaagttatgtcacaccttacatactcggagcttattttgagttcatattggtgaacaatgttaagccaaacatatgtaagagaagaggttgttatcctaaaaggaaacattaacacttgatttgacagggagtctcagggctaagagcttcaactatttataccttagttctgcaaaagacacaagtaatttgcacagctaacatattctggctgatgcagtcattgatctcaagccacacagaccaaacattaacaattggaacatccctgcatctgtatgctatggttaatctccttgtgagatgtggcaaatgagaactgggaaaccctaataccgatctagaaaatattcctatgaacaaagttcgcatcaggatatcaccacacaaaattcataaattaagccatgaatttctagccagatgaaaaacctttcaatttctcagctcctaggcgatgaaaaatcagcaactaatcgttgacaaaatgtacaacaaagaacacaagctagtcgtactcgtacgaacaggagtgcatccgaattcccaaagccgaccacgcagagcaggggacgcagcggcagtagcagtaagcatctatctaatttcgcacggagtacaagagcgcgagaggagagctcaccacgtccttcggctgcggcatccgtggcggcggcggcagcgggtgaggaagcggcagcatctgaggaagagagcttgtcccgcttgagagcgctcttcagcgcgggcagtctcggaggcggaggcggcgatggtgaaggcgcgcgctctcctccggcggccggcgcggcggcggcggcgggaggtggtaggccctcgaagaggtcgtcggaagccatggccggtgtcttggtctcctcctgcttctgtctgctcgagatgtcctaaattaatgggcctcaaactaatgggcctagttggtctgctatccaaattgagatggcccatagcccataggggagaactatttatgaaaatactcttggagttggactgaaattacgcgcctgccatgcagcaaaacctccaacgccccacactgcgtgcacttctcgatcattcgatcgcttccccaaatcgctctcctctcctctcctctccaccgccgccgatctcctcctcctccggcgccgtcgccgcgtcgcctcccggagctccggtgctgccaccagcctacgcagcgccgcctcctcctcctcctccggcatccgccaatcgccgccgcctggttcgtcggggagccccgcgccctaacgttttctagaggcgccgcggatccagcgcgaatcgatcgagaggtaaagggtaaggactcgactccagatcatctctcgatttgtcgttttcttcccctccatttttagtccattatttttttttgttttgtttttttatggctgggtggcgtctttgttctgatcagcgcggcgttgtctctcttgcagggaagttgatttgagtcggcggccgaagaaggaagccatgaactcgagaaggcaagtactgcacactaacttttcgatgtgttttcgattttgatgctatgggtgaatggagttaccgggttagggttgatgagcacggatgatttggtaggactgactgactagctggttgagctatttgtatatttgcattagggttctatatctactataactgtgtgctgaaattctctcaggaaaaaaaactataatgtgaaattatcgtgtgattacagcaattctgatgtatgctaggaaggtcaatactccttcgtgggattttatctgttagttgtgagattgcatcctttgatgtaagacatttgccaggggaaagctcccatgattccgtagttagcaacttattgatatgaatcaccggaaacaattacttatttttgctggccagctctagctttgcatcctttataacatgtttgaacattgatgtgcttccaccaaagattgatgaaatgttgtgcaaggcaatttggttcaacctgaaagaatgcctcatgcttttcaattgccattagtcactatccaaaagtttgatttcggaaggcatgtgctatgctgctgtatatttactttgctcatatgtgattatgtgtatactaccattaaatgagctttaggtctgtgactttttactcttaaaagcaactagttatatgccatttcatcctgctgccagttgatacttatagtagcgagaatcttgtggcctaagaagtcgacttcctgcattgtgtcagtttaataaaacaaagaagaaaactcaaataataactttttgtgtaaatgaatagaaggagaacaaaacacctggtagattgaccaactcatgatcattggatcacatttctatttttatcactcctgctctgtcccaagctctctatcttagttttgtaaacagtggaagtgtataaggaatcaaagaaaagggaaggccctaacaaggatctgtacagtgggatagcttgttctaaacttctactacttgatattgacattttgacatttggttgcagatggagtttatgtccagctgcaagcctttgtctgctctaaaagcttgttactcactatgcacagtttccagtttaggaatggcctgtgatcatctacctgctaacactaagaacttactaactcacacatgctgtttatccaagtcaaaagtacacagtattagctttgtcagtcaaatatatttgataacaagtattaaccttttcatgatattcataactataaattcgagttgaacattattaagatgaatagaacttgttagtattgtggaaggtatctatagaaatcagtagtatgtacctgtttatttatggcttgagattgttttggctcatagtttttcttcagttaatttgttgaatgcatattctctttctgtttttaattctttgatacatgtgtcaaaagctattgtttttgtgaacttgggagattttagtaatgtcgtcccttcatacttgacatatataaatgcattcatgaattatgattgctcagtgtatatccatgtagactaccacggtaaatgtttctatgtaacagattgaatatttatttatatggtttgcttagtttgcatgtgtctttgcattttatttccatcatatgctttgcgcacgctgattatttcatggaaattttagcaactaccgcagcaccagaacttctctttttgatggcattgaggagggcagaatccgtgcaacatcctattcttcacatgagatagatgagaatgagaatgatcaagctattgatggattgcaggatcgagtcagcattctcaagcgggtaagttgctgcgttattattggacgtctgatttgccctaagttttgccagtaaacttgtgaagaattactgttttgattttttgacataatcactcgtattagtatatttgtattaagccgtgctgcacagatggatcattaaagcaactactacatttgtaatagcgaaaacgaaagattttgttgattgtgacttcattcgtggccacctattagataactgtgaaccatgtgcttcttggaccattttcatttgaagtgttggaaagtgctacagcgcagcttttgatcatgagatttatgcttaaatatggccaagaaggaatctgagtaatctaatgggccttgtgataacttttggaagcagctccaatgccaatgattttattaatctttttggtattcatctgatccatgtttctaacatgcgactgatttacctctaaaggttttagtgctagaaattagctaatgaatggactatagaagattttgtttcaactgcaagtagccagcaaaacagaagattttaataaatctttggatagaggacacgatgtaattcttatgtaactgtgggcctcttcacacctaatcaattttctttgtagtcttaccaagacatttcaaaggtctgagccttgaattaacgaatgaaatgagtaataatatcttcagtagtttatggtgttttgctcctgcttatggatcaacagactgctggactgctggtcccgttccagtgtttggttgtgtctagtttttatagctatgcgaatcttctaccctgtcatttctttggagagatctacagacaatcatatatggatggttactgaggttattttacgtacttgcagttgtctggtgatatccatgaagaggtggaaactcataaccgtatgctagaccgaatggtattttatatttatccttttaacttttgcttccttgaaaaatatccttctagagttctattatgttgacatcttgcctgatccagggcaatgatatggattcgtcaaggggttttctgtctggaacagtggacaagttcaagatggtaaacactcacacagtacaatcttccttccatcataccatccgtatattctgctgagaccgcaattgatgtctacgatataggtttttgagaccaaatcaagtcggaggatgggaaccctcgtagcatcattcgttgcgctttttctgctggtatactacttgaccaggtagaagaggaccatgcatcacttgcctactgttgtgaagcgatgtgaactgggttgggtactcaagaacacgctgaaaatgtctgtgtcaatttaccgtggtgtcgtatatacctccaatatctcgctgtcataaagcaaaatatgttgaccagaatgtttctaactctgcactgtgtgaggattacaacatgttcgtcgtttgctctggtgctgtaattacctttacagaaaatgtttcctgctgtgttctgtaacatctgtttctgtatgcggtcatgctatctgtattatattataacttcacaagagattgtactttggagtcttaattgccatatataagacgctattagtatgtggttaatttgctgctactaccttgtaggcttgtttagcagagcttgtttgggcagttctggagtcgacacctgtcatggaacaaatccaaatcgaaggaataatgtggctgcagcgtaagccatttgtgttgtatattataaagttaacgactgctagtcagcgactggttaatcacactgatcacaactaacgcaattatcaatggagcaattattgagtgaagatgccttaatcgtgcgggagctagcaccaaacacctgtaattatcatagataattacgtcaaccgatcttaatcacatgcatgcatgtaccccaatacaatactcctactcatggctcgtatttctataccgtcttgctcgaatagctatactaaccaatcaagacggtttttctaatcatgcaacttaatttgcccatgtcgttaactgataatcgaagtctgatgattgttgtgtagagacctctctctctacttcaaaatataaaacataatcaccctaaatccaaaaacaaaaaaataattgttatcatcaacaataaatcatcgtaataaatacatgctcccaataaaattaaagattttaagagtaagtgattttaaaaattaatttagtacagatgagattttagttatttttttaataatggaatgaaacatctcagcctttgctcagaagattttagttaattacatgcatatatgtacgttttgtattatgaaacatctaaaaatagttgtgcattatactttggaatagagtgagtatatttcttctattccgggttttgttatagatttttatgtcgaccttgctcctagatactcaaaataatgagggttgtaataggtgcctatatacgtagatacttaactttttatacattaatgtgattcattcagtttgattctaagaagacatatatttcctactacctgatttgggagtgacttaattatttcccgtcaccagatgatctgggaatgggaggccatgataatattccaattaatgcttttgctactaacagagaatctatgcgagattcctttaattcatctatgagcagatttaaaaaaaaggaacttggctctgttcttgtgatcaaacacctacctgtacaacagctgtactcttgtgcagtttaattagtacgcaactaattaatcaatctgctgctttgtttggggtgtgttagagatgtcatgcacaccaccccatcaatgtttgacaaagcttaggttatccatctctgggagatgtgccactagtttaattagtgggcaaatgctttgttaaaaaaaagcttaggggttcatatactttaattggttgcacttaacttttgttttgtccctttcttttttagactggagtggaggcatgagcatgacaggatcttttatttgggtgcctttgatgtactttgcaaagccatacacatatatattgttgtgatgcaatggaccacaagatcagttaggtatacatctatacatcatacataaggttttatttattgtctcaaaatttcagtctcgcttgggaatggtcctgtagattcttacacaactcatattgattgtatttgatcaatacaatgtaactgccatccagtttcaattgtgattatatttttgcaatgatatatatactgagagaccttggttgaagttttgcttatagaatttataatctaaatatatagttcttgttgtgaaagtattgctaaattaaatgacttataaaccatgaattgcaaatgtgtgtatgatggaaatcaacaatatctgcatgtctgcctagttaaggttaccaaattaatgtgggggttcctgatcatcacaattaatctaatgaaagatactattagtgggaatcttctgtcagaaaagttttcttaatacgagagcacataatcaaggtcgtaagacatcatctattcggtctcatataagagagatctaacataaaaagcatacatgttttttatacaacgacaataccttcattattaaagaagcaactgcttgtagcttcaaaatttcatattctcttgacataatctaagtcggccatccttttctgaactctgatgctagtacactctttaatttgttggctcattaatcagtggctgcccctcgtgtgtgtgcatcattgaaatgatccaaagtcaatctggagagaattaagaaaaagcttaaatttttattggcgtttcagaagctattcggatagaaattaaacaaaaagtagttgaagggtgaacattcatacacacatggggagaattttcagttacaacagccgtcatcctgaaaatttaattattctgcctccttaatttgcaattgaattaatcaacttctgttcttcaaaagaaaatgtctgctagcttacaaattagatatatataatcaatggcacctagtaaggttcaagcttccaacagactaggagattattcatatttttgttcatttttttacactgctttaccaaagcaaggggaaaagaagcagcaactagctgattgactggagagccaacattatttttctctctgaagtatctcatgaactgacgcccattgcattgctttcatatatttataagaaccagcaaaccagatacattaactttgttcctcacaaaaaaataagacataacaacatataactttgcaatatataggtcaaaaccgtacgggttttacctaataatttaacagatcacaagcagagttggataagaaagatacaacacatgcatgtgttctttgttagtggttagctgacaaccaattgcaatttgcaagcaaaacgaaacaattaataatgatcttggtacggactacggacagaaacatgagtgtacttaaaattgatcaacctgcttcatgccaataagtacgatatatatctactaagattttcaaggctgcatgcatattacatcatatagcataatacaattatatttgtactgcacattacagtactgagtaataatctgttcctttttttttcagaaacaaacattccttcatatatattgacaacattgtaaaaggaactggatagtccttttttttcttatttgttaaaaatataattgtgttccacttaagatggagacacatatatatactagttcatgtgaaaaatactgttcttgatggacagaaaagtaagagggggagtgctttctcattggctgcaagtagctgaaataaaaattcaaggctagggctggttttgtttagttgggatgtcggagttttgagaaaaggacatgcatgcacccggctacctgccatctgcacacagtcccacacacacaaaaaccctaatcttttcactggagacagtagtacatttccatcgggcctaatcctaattatcatccacaacaaaactacatccacccactctcatcaccatcctaatttaggaccaacatcacaccaataagttaaaagtagtggaacagtaggacgccgtatatgtctcttcttaaaaagtaggtatcgtgtgtaaaatggtcatttcagatgaggttgtcactgctgtagatcgacatgttagattcttactagtcgcgttcgataaatattaacaaaatgcgggtaccagttctcatccacgactaaagagagcgattatttttttacaccagtcatcagcacaccaaacagagcaccactagctcaatagggggaccagtctaagcttgtgatcttaaatagaaaataaacaaataaatgaagccttcaccgaaacaagttaatatgctaacctgcaacgtacatgataaactatatttccaacatttgaattcacatggcaaacggggacccaaagtcaaaataaaaccgcaaataaccccggggaggagcatgcaggggaggatgggggtaagaagaggggtgtgctccttgggaagaaaggccacctaattaattaagtttttgcttagtttatagtggcacccaaagtctctctctctctctctctctctctctctctcctctccatcaagtcttcatgcttacatgtccacctttctccctcccctctcttcctttcttataccccacttgccctcctcttctcagtttctaattaagcagaagctactcttcttcttcctcctcttcttcttgagctgtccaagctagctacacctactaaacctccacttcacatacaagcagctaggttcaaacctagcttgcctagctaagcttgagaggaagagggtttcacacagagtgagcttctacctctgaatcactctacctaagacaagttagaagagagatacatcaaggtatgcagatatatgtgtgtgaattcagatctcctcaaatttatgcatgcagcaatctccttttcttgatttaagttgatctcttgttgatttcttgtgttctactgcaattgcatacactaatatactattagaggtagattgattatgttgtattattagcaggcagctgacatgtgtctctgcagcagcagagaagcaattagttgagagattaagcatgcagtgcattaattgtgcttctcctggagcagggtcaagctggcgaacaggtcgtggtggtcgggccccatgggcttgccggagcagccgtccggctcgtcgggccccaaggcggagctcccggtggccaaggagccggaggcgagcccgacggggggcgcggcggcggaccacgccgacgagaacaacgaatccggcggcggcgagccgcgggagggcgccgtggtggcggcgcccaaccggcgcccccgcggccgcccgccgggctccaagaacaagccgaagccgcccatcttcgtgacgcgcgacagccccaacgcgctgcgcagccacgtcatggaggtggccggcggcgccgacgtcgccgacgccatcgcgcagttctcgcgccgccgccagcgcggcgtctgcgtgctcagcggcgccgggacggtcgccaacgtcgcgctgcgccagccgtcggcgcccggcgccgtcgtcgccctgcacggccgcttcgagatcctctccctcaccggcaccttcctccccggcccggcgcctccgggctccacggggctcaccgtctacctcgccggcggccagggccaggttgtcggcggcagcgtcgtggggtcgctcatcgccgcgggcccggtcatggtgatcgcgtccacgttcgccaacgccacctacgagcgcctgccattggaggaagaagaggagggctcaggcccgcccatgcccggcggcgccgagcccctcatggccggcggccacggcatcgccgacccttcggcgctgccaatgttcaacctgccgccgagcaacgggctcggcggcggcggcgacggtttcccatgggcggcgcacccccgcccaccgtactgatcgatggcaatagcatggaagattcatggcggctagctcgccgccaccggcagcggcggcggcggcgatggccttctcttctagcaagctctagctagctgcatggttactgttccattggaggacatgatgatcgatgtgatgcaagatcagtggcgccattaattaggttagtacatatgatgaagtggtgagattaattagctactactgctactatgctgctgctacttaatttgttgtggtgaaataattaaggtaaggtgatgcttgtggtttaattaatttgtacttaattgagctagctatctagctaaatctagctcggatgatgatgcatgcgatgtttcaagtgtttctaatcgatgtttttcggtttaatttagaggtaatttgtctgacattgttgcaacttgtggccttttctagcttctttccttggaatttgatctgtgcaacatgtgcttctcatacttaatatatgagtttcaggagaaacgatcatttctcccatagatcttaactactatgcatgttctaccagtatttgcatatatagtatgtaagctatagtatctgttggtcccaaatctagcactgctttgagcaaatttattaatactctcttctctgccttctcgatcccatcttcaaaatctgatgcaaaattagataatctagcaagcgtgatctcaactttgttaatttgaatgtttcaatgtaagcatgcacgcgtgcgtgcaaatgtttactgtgtttccagatgtaactagctctagcgctagaacttgagtttttttaccaaactaacaagagttttcagtaaacttcagtactactgaatgtgaaggcgtgcagtgcttcagatcaactttcacgtgcagcactccatgatttcaactttcaatcaaatttttcagtaaaaagatgagcttggaatcctaggatcgtttagggaattaatataaggagctagctgcatctgcatactgaatgaaatcaaagggtaaacatgattgcatgaatactgaataagcttctgtgtatgagaactgaagcttatacacttactttctaattggggagatattgatgcactattatataagctagtttcatgccatttagagctctgaaatgggggacctgtagatactactatgatttcaaatgcatgaaactcaatgttaaatgtacttttttctaaaaaaaaaagaaagatttttgtgtatgcatagccggccatgtataacagctcaattaattaagtgtagcatgcatgttattaatgtggaaaacatttttccgaacacaatggttcttataaatgttgatcaatgtctgttgtataaccaaattaatgcatatatagctacattgatcaaatacccagctaaaaattatataattgaagttaatttgaatttcagttcagacttgtgtgtgcaaattgcttagtcccaaaatgaaacttgatatggccagttttctacacgtgcaactccttgaagaagaatacacattttaggccccatttataggatttgtggaggaattttgtaggattcaaatcctataggaatcttttcaatttttccctttaagacgaaggattggagtacgctttcaaaattatgtgacattgctaaggaatgtctcgatacatgtagattttggaggaaaattagagcttcaacctattgaaaaaaaaattccttttgtcttcgattcttgcatttttcttgggatctatatattcaaacgattatttctattttcctgtgtcttgtgatcatctattttgcacttgcattcctgtcaaagtaaaaatcatgtgtttttttctattcattttctcaacctcatgtttcaaagaatgttgcgatttcttatccattttgcaaaaaaaaaatgcatgaagagatgaggtaatattgtgcatttacattttgtttgtcttaaagttcgttgatagatatatcttttcaagcactagctattagcaagctagctaggaaaactattagctaattatattaaagcatgttgcaatttctttcacaataataaaatatgtaggattaaatctactaatttgggatatttgttgaaggttaatataatttctaaatttgtattcaacagccaattaattagcatatatacacatataattagtatatgtgtaggtgtccgctttgacatatgttatctactaataataattaggtggatcaattcatgtgtgcatggaatatcacaattcaaattgtggtctaaaattgtatctataacggccgtctgtcaattgatatgatatacaatatgctgaataatgcttgcgtttcgaaaaaatatatcactatattgtcaatctattatctattacttcctctttttgaaaatataaggcacataggttttcacataaccattatttttctaattcataatatattatctatatataacaaaaaaaattaacatcatatgaaaatattctcaaatgcaaatatagtgatactatatatgtgcatggcactagttaaccacatacatttttagcttaataattagtaaaaaaaagtttaaatgttgattttgcagtataaggacgtcttatatatatttactagctagtattctattactagtgtatacgtttgttttccaacgaaaaggcagcacaatataatgtgcttgttcacgttgattcggtggtcctaattattgagtgatcacatcttgatcgatcgctgggggagagattaaatcaatagcgcgcgtcgttagatttgcatatggtcctaagtatacgtactatactagttgcttaatttaaactaatatttccgtcaaattatatcacttactacatgcgcatataattaaatatgtgacatgtccgctgccatcgtccgaaaagattaatcagaaatattagtgggtgttacttgtacttctaattttcattagcaaactgcattaactaatgatgatcatcaaagctatttgtctgttagttaattttgtatacgtgattacgtgtacatacgtccgatgatgtatagacattaattcgatcatattcgaatcattataaatttaaattaataggggttgctcctgatgtatgtacatattgatcatatattgcgcatatgttctattgttcggtttaattagagctagctagctagtgccaagagagattaatcttaattagtttgtctctgttgactttgcatccgatgatgagcgacgtccacttgtacttgccttgttactcttaaattaactcattctctgaccgaagattgattgcgaaatgccgatgtgactgctgcaaattaaggggaatttaagttagtgaaatgtttaatcagaaattaatatacataactaataaattaagcacttatgtatcgatacaattgaccaatgcaatatatgcaaaaaagagcactactagctagtagctagagtactagactatactcctaataaacacaactgaatttatatatatatgtcatttagcaaaggagtatatatatatatatgtagttggtcggtatataaaattggtaggtgatgtctagctggtcctgctaattctggtcatcaggtagagatcaaaaattaactgatcatatatccatgtatatattggggtgcacatgcacgtacatgcatggaactgtacatctatatatgcatatgctagcttaatcaaggtgtgcttctatgtatatacacggtacttgaatgcaattaattagccccaaattaaactctcaataattagttggttcaattttcagctggccattatcttatctgatctgattaattagctgctagctacgggtgtaaagtttactacaaggttccatttctaggttagattaaatttccccaactaaagtgaacgcaaatttgcatcgtgtcttgaatgaaagggatcgaggcactgcagtgtacagaatatactatacagagatggaaccaacaaaaggtgacgcgattgaccaccatgacactacacaaactaaagcataaatatatgcccctaaatatatatatgcaacgacgtggctgtcttgtcttgattattagagctaatcttgtttgtatgtgctatgcatacggaagcatggtagtagctaaatgtcggagttaatttcatgacacgtcaaagctagagcttgacaaaagatgactatatgcatgcttatctcgttgatttcgctatagattgttacacgtcaatgcagcactgtgtgtcaatgatctagctagttcctggctattattatctacagtactatatatatgatctctgctcaagctgtatatatatatgtgcatgctttactaaaaaggaaaaaaaacatgcatgcatgtaaaaagaataatccatcattttgaataagtaagctagctagtactgtttttgttgaaatttatgtgttaactaattaactacaagttgcatccatatggggtgtagctagacataaacagattaaggaaaagtgcagaaatgtgtctagctagccttattaaactatctatgagaatttacaaggacattaaactatcaattgccaactcatatattattgaacaggtagatcgatcggtataaattaattaattgccgtagcccgtaggtcaaaatctctttttttttttacatgtacactgtctgtataagtcaaactgtagtatattaattgtatacggtctaatttgtctgctgctgcgtaatatgatccttgaaaccaacttatacaatctcgatctcgattctctcctagctagctgtgttgtgacacttgtgtgagaacaaattaagtccacgcatacatgcgtaggaggaaattgctttctttaaaaagatatacacacatattgaaatattcagaatgtttagcttaactaatatatgaccaaaatattttcagtttatacgtacaaataggcttcaatatattcattcatgtttttaagtgctttagcgtagttgaaaattaatgcgaacgggggagagagggagataatgtagcccaaatcaacaaggtttattgggccaacaatagtgcgggattcggcccaattgagtacagttcgtcagttgcgttgcccatggaccagttgggggtggtaatcttaattctttccaggccaagcccgtggaccatctcatttcggtcatcagtacttcactagtagccttcacctacctgatgatgtcgtcatctccatccgcagtgacgtgattctttattcctcacaatttacgtttccattagcatgctttttaaagtactgaacgttagtaaacgatgtgtttcgtgcgaatactttatatatagaagttgctttaaaataataaatatattcatctatcaagtttataataactaaaacttaattaattactatgtgctaatgattttctcgttttacgtacgtcaactttatcttgatctttatcagtttcaaacaccaccataaatctagtgaaagttttatcaaattcattattctaatttatgtttaaacctatttaagttcttatatttttttaaaaaaatacgtagtgattaggggtatatagttgcaaccgaaaaggcaaaaaggcattaagaaaaacgtgaacagtagtagtggtagtagttttcaacatttaattcgccattaggatagtaggagcggtagcattcaatttattaatgggggatttgcttgtcctttctcctttttggcgtttataaaagtataaaatccatcgcccaggtgctcctcacctggtcatcctctcatattgatgaaaagtctcctctgctggtcacacgtccgccttgtctgctagtgcccgcccagatgtcagatgccaccacatattactggtactacttcattattattattttcattttcttctgcggcaaacgtttttgctaacaacgcaaaacacttttcctctttgttttttctttcatacgtttactgagacactacggttagtaatcactccctgctaatctagtacgggatgcaacgaatcctaatccctccgttttatttcaagtgcagttataattttctgtgcctaactttaattgtccgtcttatttaaaaattttttaaaaaaattaaaaacataagtcatgcataaaccttcttatttgctacatagagctactgtacccgcctattggcaccaaccagctactgtccttaagtccttgccctcagccacatgcgtgcgttttacactttccgacataagaaagttactagtgcacgattaattaagttttaattattttaaacttaaaaataaatttgttgatatttaaaataaattttatataaaaagttttcatacgaaacgtatcgtttagccgtttgataagcatgctaataaacgagatagaatctagtagtaatatcttaatcacaaacacatgtagtgctcctctccctagaataatgggaaacaatatgctacaagttaataagattcagagcaattcatttttatacaaaatagcagaacatgttgcgcagagaaataatggaaaagtttctctaatctaggatattaaggccagttttaacgtgcagttcggtgaagctgttcgcggttcggaaaatgagaagtgtcattagtgcgtaattaattatatattaactattataagtttgaaaatatatatttatttgatttaaaaaaaacttgtataaatattttctttttcacaaaacacacatgttcgagaagcgctaacggaaaatcaagaagttgtcatctttagagctgaaaagaacaacaaacgattgagtcatccaatgacactcaacccacaaccaacaaaagtatggtcactattataatgggaagggatcacccacatataagtggcttaactacacatacagttaagttaagtcagaaaatattcttccgttacaataatatcttgcttcccaccggtaatatataggcattgttatttgacgttttattattttttcccacaactagaatatcacaataatatgtagtaaaattataatattgttaaagtactcataaagaaaaaaaaccacctttcaatctaaatagggagagttaagtttcaaaatgatggcataaagttaacggtgcattgtctaaatatagagagtgagggagtacctggataagaggatagatcatgaatcttgtatcctgcgaagcactcaatgtggcatgtactatgattgagagagatatttattggtaccaatataatactgtagagaccgcttcaaagtttcacaagttggacttggactgcttcttcagtcggttgggcgcctggctgccaagctacctctgctgtctgcaacggcgtcaccacaaatatccatccatgctcgtcatcagcagagggacatttctcgactcaatcggtgagacacggttacatttcgttatggatctccgtatctttctttccctcgatactgctacctaccatctcctcctcctcctctatagtattgtggtggtgtttggttggagggactaaagtggagctaaactttagtccctctcacaaaaatataagtctctactatagggacttataattttgtaagagggactaaatttagtccctagttcccaaacaccccctgtgttcggccaaactaaatttgggttacctcgtaaaacggttatcatagtaaccatatagttaccatgaggattactatgattttaaaaattaaaaaagattatcatgcgtgataatcgtgcggtttcttaaacctgttgttcggtagcagactgccagttgcagcgatttggagcgtctgattggccaaagcattgttcatcagttatgttaatcggtactagtaaatcaggggaagatcccccatctgatcatctgatgctccgtgatcactgctgtctcccccacttgctctcactaccgaccactgctgatgctcctcttcttgctcggtttctttctcccgcggacactgaaacccaacaacagccaatgcctatcaacaccctaaccacttgctgcctcccatggcgtaagccctcctgcatagctggcgtctttaccttcctcttcctcttcttggtgcctctctcggtctctcatctcctctcctctcctctccaggtgacaaattctcccatccatccatcgattgctatcttctcttccgtatttctttgttcattggtctcttttgcagatcaattggatggcatctttccctggaacccaatatcgatagcttcactgttgcagacaacaaactggttctgctcaactttgaggtagtaccacaaagcttcagaatttgttggatttgctccacctctgtcctgttttgggatccaaagtgctacagggattcactaattcgtcctgtattcactttgtgttgattgattgattgattcaggacggccgcccagttcgatgaatcgatccgtggatccaattctgctctgctgaagctttgatctttctggtaattcacgaaggcaaaggagaaaaaaagatgaagctgatgctggttttcttgtcctaattcctttgcctgctttgcttgcacatacagattacagatgatgccattccgggatgttgctctccacttggacgccaggatgcttccagggcaataaaatcttgttaagatctctaatcacatggtattatctcgaatttatgccaaagctgcggcctttttattttcttttttacttaaccttgccaagttgcgctacggattcgccgcctatttctgacaaaagctcctccattttcctcccattggcgcagcagcagcagctagtccactggatgatgcctccaagattcagatgccaagattacctcctgccgctgctgctcgccctttcgccggccgccgccgccgcccgcgaggtggagtaccaccattgccactgcgacggcggcggcggcggcggcggcggggggttgtggagcatggacagcatcttcaggtggcagaaggtgagcgacctgctgatcgcggcggcctacttctccatcccgctggagatcctctacttcgtcgccgggctccggcatctcctcccgttccggtgggtgctcgtccagttcggcgccttcatcgtgctgtgcggcctcacccacctcctcaccgccttcacctacgagccgcacccgttcatggtggtgctcctcctcaccacggccaagttcttgacggcgctcgtctccttcctcaccgccatcacgctgctcaccctcatcccgcagctgctccgggtcaaggtgagggagagcttgctgtggctcaaggccagggagctcgaccgcgaggtcgtcctcatgaagcggcaggaggaggcgagctggcatgtccggatgctcacccacgagatccgcaagtcgctcgaccgccacaccgtgctctacaccaccctcatcgagctctccagggtgctcggcctcaccaactgcgccgtctggatgcccgccgccggcgagatgtgcttgacgcacgagctccggcgagacggcggcggcgaggatggcgtcgtcggcgtcgacgacgcggacgtcgtcgaggtgcgggggagcgacggcgtcaagctgctcgggccggactcggtgctcgccgcggcgagcggcggcaaggaggagggcaccggcgcggtggcggcgatccggatgccgatgctgaaggtgtccgacttcaagggcggcacgccggaggtgatccagacgagctacgccgtgctggtgctggtgccccccgccggcaagagctgggggcggcacgagatggagatcgtcgaggtggtcgccggccaggtcgccgtcgcgctgtcgcacgcgacgctgctggaggagtcccgggcgatgcgggaccggctggcggagcagaaccgcgagctgctgcaggcgcggcgcgacgcgctcatggcgaacgaggcgaggcaggcgttccagggcgtgatgagccaggggatgcgccgcccgatccactccatcctcggcctcgtgtccatggtgcaggaggaggccctggcgccggagcagaggctcgtcgtcgacaccatggcgcgcaccgccaccgtcgtctccacgctcgtcaacgacgtcatggagatgtcggccgacagccgcgagcgcttcccgctcgagacgcggccgttccacctgcacgccatgatcagggacgccgcctgcgtcgcccggtgcctctgcgacttcagggggttcggcttcgccgtgcacgtcgagaacgcgctgccggacctcgtcgtcggcgacgagcggaggattttccatgtcctgctccacatggtcggcaacctgattggccgcaccgagcccgggcatgtcacgctccgggtgcgcgccgccgacgacgacgtgctggacgacaggctcggccagaggtgggatccatggtggccgtcctactccactggctactcctcggtgaagtttgtcattggtgtcaagcggcagcagaacggcgatgccggctcgccgctgtcgcggaggccgagtgggaagggcattgatctcagacttagcttcagcatgtgcagaaagcttgtgcaggtagtgttattgcctggatcactgcattgcatctgaatcatctgaacatgaaattagcagtccaatctcaagagagcatattaccactgatgctgatgtcctgttgatcctactgacagatgatgcaagggaacatctgggcgattcttgatccccaagggctaccggagagcatgactctggtgctcaggtttcagctgcaatcgccactgacatcatcaagccttggaggatcattcgagcagaagcactcgtcgccgtcgtgccagattgcaggcctgaaggttctgcttatcgacgacgatgacgacatcaaccttgtggttgctcggaagctattggagaagctcggctgcgtggtctcctcgccgccttcaggatcaggatttctcagctctgttggctcctcagcagcagccttccagcttgtcatggtgaacctcgaaatgaagagagtaaaagcccttgatgtcgcgacgaggatcagccagtacaggagcggccgatggccaatcgtcatggccatggcttccgaccagaaggcctgggagaagtgcgctcaatccgggatcaatggcatcctcaagaagccggtgattctgcaggagttgaaagacgagctggcgcgaattcttcagagcacatgatgctgatgtttgctggaggtctgtttgtctaagagctctgaagtctgaatcggtaaaagctgtgaatcctgtgatcagtgtacaacctcgtcatccagcattgaagaatgaagaactcagaagaattctgtgatcagtgtacaatctcgtcatccagcattgcagaatgaagaactcaaaagatcttcgcggcgaaaacggggaacatctctaacgaaagaaagggtgccctgatggatggcaagaacacatggaatcttggcagcaatggcgtccccgagaaatcttcttcgcacaaattttgtaatatgagtttgagtgggaatacaagtcgtgtaattttctaatgatcgagatgtacactcgggtgaagtcaagggaattcgtacttgactctctctgtcaaagcaaatcatgagattggaatcaatgagatgatatctcaaaacactttcagttgcactgcagcttgcacgtgacgccgcgtacggggaggaattgatgaaattgagaatcgaaatgggtttgacttgctaaaatcgagtagagagagatgggacattgatcttgaggcgaggagaggtagaacgtgggattccattatcttaaaaaaaaaaagtagaacgtgggatgtgtgggaggtgtatcacggggaggaggatcggattgagatttgcagggaaggatcagtccgtaccggatcggcagcagatcgcgcattcgcaggagcaggcgccacgtcgtaggagggctgatcccttcccggcgagcaactccatgagcgccgcctccgcctccgccgccgccgctgccccctatagatccggttggttcgcctgaaaccgcagccatgagctcgacgagcaaagtacggatagcgtccaggaggagtagagggagggcggtttgccgaagcggtcggggtaggagacgccgaactcgagggcgagcgcggaccgccgcggcagaaggggcggcgctgcacgccggcgacggcgagcgccgaccgccacaggagcgggtggcgatctcgtgaggcccaagaacagaattggatattacgtgtacgtgcggcccaattttgttgggccgggacgaaattacgtgcttccatgctagttgggccgtcagccgagacctttcttgtggcccaataacggaattgtgagttacatgcagccgattttacctaccgactggaaatttcgacatgcgtcaggccgatttatgttgatggaaattacgacatactcctacaccgttgactttttagcatatatttgactgttcgtcttattcaaaaacttctgtgaaacatgtaaaattatatgcctacataaaaatatatttaacaatgaattaataattacttaaattttttgaataaaacgaatggtcaacaaacatttcaaaaaaatttaaataagacgaatgatcaacaaacatttcaaaacaaacatttcaaaacggagggagtgcttacgttcataggctttctatcaacttgtccaggagatcaaggagatagctagatttgctactactaacgtgcagattgtaaatccacatagtagcaacaggggcccacaatttgatgacattagctactataataagtgcaaagcaaacaatttgtaaggacaccgagcagataaactgtctagaatacaaactacacggcagatctgtgacaaggttgatccaattctaacagagatccctcatttcaagtctggacacttttagaacagaggtagctggaaacatgagcatcaagaggtgccatgacaaaaacgcgcagcttcaagcgatttacagcttggctggctgcctgttcttcttcttcacaccagacttggcaacctggaggctgcggtacactgagctaagccttgcaagagccggtttggtcagatctggcctgtagtagttgtcactaacctgcgcagaaaagaaacagctgttaagagcacaagctatcaaagatttcttcaggaaggtacatacaggaaagctgctgtagagagaacagtagcagcttgattctgctcagaagccaagcgtaacaagtatttgtcatcgaagaaccaattgataggttggccttcttatgtgttacggctcatcacagcagcatcacacattgtaacctcaaacatgggaaaaaaatttgattcgagtattgataaaaacaaaacattccttacagactagcttgtgattaattggcaatttactaattttcagatcaagttataccaattgctgtaacaggagtatttcacagaaaaacaggagcaatctctgagccttcttccatgttggggcttatcacagcagtgaatagaaaagaataatgaagccaatacgagatattaaggctcatcacaacagtgcatctaaagcatagagcatcacaaggcaaaataatgacatgaaactaagcatttatcttccaaatacctggttcttgacagccttagccatcttgcggaactccttgcgcatcacagacttgtggtagagcttagctggggcattctgcttcttggtcttggtcgtggagaggaccacagccgcgtcctttccacctgatggctggatcgtcacggtcttcttgttcgccaagccttacagaacacaacaacactatgtcaggacattgcaaaggctgaatcaaaggcataatttgcatctaaagcctgtgacgttgcgagaagcaactactgaccagagtgcttgtaggagtgaacattgtacaggttgttgggctccttggtgaactgcaccttggcattgctgtttccaaactgcttcacgaggaagcagttgttcttcttcacaatctcccagaacaaaggctccggaaccgtcgccatttcgctgtagctacatcaccaaacagatcgaccattacaccatagcaaatgaccatcagaccactaagtgaccattaacacgcaaaaacattacacaacgctggcagcaatggtgtcgatcacaaatggcatctgccctaaaatctctcatccaacatcatattgatcgaaatggctagccctatcagctatcagatctagagaacacggatgatgcgcagattggagcatagcgaggcgatctaacaagctaaacaacccgcgtgcaccgaattactcaaactaaaactaagtttacagttattgcagccaaacaactgaccgaaaagcataatagtatcactgagaatttcacgacaaaatcgaccggtcaccgagaatttaaccgcaagaggcagcgatcaaatctaccaagcaataggtcttacagtggaaacagcagattttaagatttcggcagagaatacaagcgcgaggggtgtcgaactcaccggagacgatgaagccgcggcggcgcgtcgctgtgctccggtggcgtggtggtggctgcggcctgcggaacggtgcgacggcggcgcggaggctcgcttttatacctgttcgtccttgctcacaaaccctaggttagctccgcttttaatgggctttattgggccgagcaaataatccgccatagcccatgggctactagacgggccgaaaaagcccaaaacacaagaccaactgaccagccgcctcatcaccgaattaaattcgaaaatatactgttccattcattttatttttagaaatattcaggattcaaagctttttgcaaaaatataccgttgatctcgcacaaccattacgcgaaagtgaagtggcgtgacgtcgcgggcggtatcgcgcgggggaagcgtgagaccgtgcggtcgcgcgaaatgaaagagcgagaccgtgcaatctcgctgaaccaatcagcgataccgtatttcaaaatggtgaattagtgattaattattatgattaatgactaattattattagttaaatagataattacgtcattagtcactaagcaaatggagtttgctcgtccttcccgcgacagcgcgcggtcggtgcgagagaccacacggcacacggtctcgtgcattcgctgtgcgataccatcctcgacgttacctttacgtcattttcgctcatcggttgtacgagatcgacggtatatttctataaaaaaattacatcctgaatattctttaaaaaaattaaatgaacaatatattttcaaatttaattccctcgatcgtctcctccaactccggcgccgcctcaacaagacgaagcgttccgtctgaatctgattgccgccggcgacgaacgctccgtcaaattccatagataaaaagctctttcttccactagatatattatcaaacagggacgacgctagagtcacttatcagggtcagtagaccccgacgatttttttgcaaacatcttgtaccagcactaatttatcagctacgaccccagtcaaaccccggtggtccggtgatattgttctgttcaagctcaattagcaactaaacaatactaacaagtagtaaatagaaaattagcaagcacttattatacgacagcccgatatacgtatgagatttgagcccagaaggctttgtattcctgctaaacaagtccacaaattgccttgttgtgctgctctgtattcctgctgcagtgcagtctggctcgaagcgcttcgcccaatcgtcgccgattggcaagggtaacccactaaccccatcacaatttcttaattattatcatcacaaattggttgtaggctggtttctcaagtccaaaattttaggaagttagggttctgaaatatgaagtttctcccaatttctgttacataaacataaatttattctttctagaaaagtggaaggtaagaaattagtgattttgatcatctacagcagcgtgggtattttgttttacataataatcattctattttttaataaattaataggcaagcaaagtataatggagtgtgattcttgagaagaaaaatacccacttactagttcatgtggtactaattctcctttatcagtggagataaccttctcggtaataaaagttgtgtagacaatactgcacgcaatcgtatcggtaataaatatatggattactccttgcgttttaaaatatagctacagttccaaatgatgatgacgtggttgttcgttttcacaagatgaaggatcgtaattgtacacatgagaagtttgtaacatgtaaaacataaccactttacttaaaaaaaactttattttatcatattatatggtcgatagttttattctaggattatcttaagattattataagctatagtcagttagtggtgaccccggtgactatttttcctggcttcgtccctattatcaaatgaagtaggtacaacaacttctccaaaacaattaggatggcatcacgattctcgagtaccagaacaaaattcagtacaactatctttttcatccacacaacatatggcgagaatatgttcccaaatacttgtgattttagctactaaaatcacacacttgtcagcatatacatatcagggatagtatgttctgttgaactaactagtcgtgtcaaggtctatgtatactaccacttgttgatgagctgatccatgtctgaattggttccagagactggtatattctgaaaccaactttctgtaccttaatgtattcagggaaaaacaaaagtgaagtagtagctggacatgattatttcttcgtaacaacaagtgaacaaacaggggatcaaattcagtgtgctcaaaacatctgctgctataaccgatagttgtatgcctttggatttcgtacttacctgagaaccagagtacaaattccttctagatcttatttggtgccaatgtacaatgggaacgtattactagtgtctgtctccgtagctaattaaccaatcatcagtgcatatagattgttgtcacatatatatgtcttcactgtaaaatatactccctccgtttcgaaatgtttgacgtcgttgactttttaactttttagcacatatttgaccgttcgtcttattcaaaaaatataagtaattattaatttttttctatcatttgattcattgttaaatatatttttatgtagacatataattttacatatttcacaaaaaaaaattgaataagacgaacggtcaaacatgtgataaaaagtcaatgatgtcaaacatttcaaaacggagggagtatattttatctcttacaaagtgtaaatttaaactaaatgaaaagcaaatagtacatacattttgttattggatgactgcaacatagaaaaaaatccatggcaatatatgttcaatgacagctctgaggaaatttgcattcttcaccattgaaattttaccataataaaagcaacaagaagtatattgtttcagatatattctgtgggggtaaaatgtgaagtacatagaaagctacctaagctagagatctaaattgaaccaaatactccttcaaatcaactcaattatgatgaaaaagaatacgtaattgacacacatttaagtattgattcgatcatgagcctgcagagcctgaaccaccaagtctcagctccaaatccaattcctcctcctccccatgatcatggccaccattgccatccccatccttggagcagcagccgtagcgatctcgtcgatctctaccaccaccttcttcccgacggccggcgccgcgcccaaacagccttagctcttgcggcgccggctcggcggtacgggacctcaggctcgcgccgccgccggccgccgtggacgccgccgcatcctcgcttcctccgctcgccggcggacgaaacaacctcacgagcgtatcgtagctgacgcttcgccttgccgccgccgccgtcgtcgacgacgaggaggacggcgtcgctcttccaaccctgtccttccggtggacgttcatgtgcccgccgagcgcctgcgccgtcgggaagcccctcctgcagaaggtgcagttgtacggctgcctcgtgccggcctcgtcgtcgtcgtcgtcgtcgccgctgcgggcctcgcggagctcctcctccgccttgtctccgtcgccgctcggcgaccttccaccgatcacctcgtccttgctggttttttgactcatctgcttctgctaagctaggtagagagagagagagagagagagagagagagagctagggtttactggtttactggtttgttgatgagattcagtgagcttagctgcttattgggatcgaatctaagctagccgattgtgaaaatgaaatgtacagtcaagcgagatagagaaatgcaagtgcacaataatcaatgaagtttttatgcagctcccatgaccattgtgttagagattacctctcgctgatttggatgttagccttgttttatgtttcttttttgctcattctgccggccgcaacagttgtttttgtctccgtgttatttgattttgatttgatttgattaattagctgattgattaattaactaattaatctgagttgttcagctatggccggccttcatttgcaacgacctgactggttcttggcctctagtttatcgagggtggtggcttagctacctgcagtgtgcttttgtaagcttgtgcttggaagcgtttgttgttgagtctttataggagtaatatattgtgttacgctatatgacatgttcaaccttttcttatacatagtactatcctatattattgactatatatatcattattccacatcatcattttcttttttattgataacaagtcatgtcatcatgtagtttacccaaaaagaaaaaaagcagaagaagagaagatagattcagtttttaaccactagtgttgcatgaagcggtatgaggccatgaattctcacttccttgcgtgccgctacggcccatcaaggcctatcccagaagctcgtggcacgcgaatagactggcccatacatgtggtttttggcccatccaaaataatgacaagagtaagggcatgttcactttgataccattttcaaccataccattttctagtaaagttgctaaaaaatgactacgtttaatttattgccaaatttgctaaatacaaaagaaatcctgccaaatttttggcaatgccaaaatttggtaaggtttattttggctacaatctaaacatgccttaaattttactttaagacaccttttattactgatgtttcgttttgaatcaccctttaaccaatgctttcactttagaccaggtaattttacctctgtgacactttgggccacccctcaaatcttttatcgttctacattcagtttgtcatatgtcaaagaagcaatctaatggttgatggagtttattgacaagtatgagccgccatacacttgtacttaaggtcattctatgcatgagaagagagttgaggtggttcaaagtgcaacaaatgtaagatttacccgattaaaagtgaaaacattggttaaaaggtggttcaaaacaaaacatcggtaataacaaatggcccccaaaatttttttaatctaatagtaaatccagaacgtgatgaacaaaaccagatggacaagtaacgaaggcaaaatcacattccaaccgtatcgtgtcagcgattagctcgatcacaattcacaaacaacatcaacacatgagcagaattttaacgaatactttcgcttttgcatatttacagcaaaacgttgattaattcctccagagctcgccgctccggtcgccgccggtgccggcggacgacgagctggcccggtcggagatggacgagagcggcgtctcgtcgccggcggcggccaccaccatgtccctgtacgtcttcctgaccgcccacagcgccctgcagcactcgcccatgctcggcctctcctgcctcacgggggcgaggcaccggaacgccagctccatcaccatctccgcggcgcgcgccgtcgccggcgtccgcggcaggtgcgggtccagcacgtccgccgccgcgccctcggcgagcttgcgcatcgcccaccgcgccgtcagccgctcccgcatctcccgcctcgcctcgatgggtcgccgcccggaggcgatctccagcagcagcacgccgaaggagtagacgtcgctccggtcggtgagctggcacgtcttgaggtactccgggtcgaggtaccccgccgtgcccttcacctgcgtcgtcacgtgcgtcacgccgtcggcggcgccggcctcgccgacgcccagccgcgcgaacccgaagtcgcccaccttggcgcgcagcgacggggtgagcagcacgttcgacgacttgatgtcgcggtggatgatggggtgatcggcgtacatgtgcaggtacgtcaccgcgtgcgcgacgtcgatggcgatctccagccgcgcgcccatgtccaagaacctcccgttgcaccctgcgcccaagaacctccattagtaaccaatccgatcgagctcgagctcgagctgcaatggcggatcacacgcactgtcgaggtgctcgcggagcgtgccgttggggacgaactcgacgacgatgaccctctcctggccgcactcgaggtagccgtagaagcggacgaggctctggtgctcgatgcgcgccatggccttcacctcgctccggaactccacgtccacgtgcgggttctggtcccggagcttggcgcgcttgacggcgacgagcgtgccgtcggggaggacgcccctgtagacggcgccgaagccgccctggccgaccttgagcgccggcgagaagttgttggtggcgcgcaggatctcctccatggagaacaccgagctctggaactgcgtcgcgatgcctcttcccctgctgctgttgtacagcccgcgcatcgacgccttcccctgatcactgccaggccccggcactggaatcatcaaacagattcatctatcaagaattaattcccaactgcttaattgctgctctgaattttgaaaaaaatgtttgaagtcttctgtgattcagattttataaatatgattctgtaagctttgcactagcaattctgctccagaaagtaaagaattcagagtagttgcggcaattggactgtgataattgactgtttccaattcagagtagttgcagccggcaactggactgtgataattgactgatttcttgaacagttcaggaacagttgcatcaattgggcaaataattcggattatatcctgtttgcttgagcaattcaaatcgaggtaattaaggacaaggatgaaatagatggagaagaaatgatcgagagaaacaatttacatggcggcttcttgatcaagtcattgggctctcttctgctcctcctcttagcgttgctgccggaggcggaggtggccgccgccgacgacgaggaggaggaggaggtggagagcgagctgaaccacaacccgatcgtcctgaagagcgacttgagcgacgccgccctactgccgccgcccccgacggagagcggccgcgaccacgtgggggcggggctccacggcgcccatcgctccctctccagctccggcgtgcgcctcccggacgacgaggacgacatgctgcggcggcgctcgcgtccctccatggccgcgcagccgcccgcctccgctcagagctcccaacgcgccggccaccagggggcgcgtacgcgcggcgtggacatatagctaagctcggccaagtcaaggggcgcgaccatgtccaacgccggcgagcgcgagccggtgggacccgaccagttaaacatcagtgtcactgtctgtggggccggtgatgtcctggggcccacttgccagtgagacgcggcgtttgaggtggacctggcaagcgatgactagttcttcttcttcagacttggcttgttgctgcagacaagagtgtgatagcaaatgttaaggtactgatcttgatcggccaactacactaattgaatcattaacatctccctcttcagcgtatataagctttagtcgcgtcatcacgtatgttcgcagcaactttcaaatcgcattttttttttataatccataacctatgttcaaagttcaaatccatgggcacacacgcacgcaacaagtccgtaaagtttttatagcccttttgcagctaatttagtcacgcgtatcctgagagctcactctatttgtcaacgaaagcaacatgcgtcacagcgtcagctaaaccatgtctccagctggcacttaagcatgcagcaggtaactgtgtcaccggcttcaacaactagattattactccctccgtttcgttttatttgacgccgttgactttttatcacatgtttgaccgttcgtcttattcaaaaatttttgtgaaatatgtaaaactatacgtatgcataaaagtatatttaacaacgaatcaaatgataggaaaagaattaataattatttaatttttttgaataagacgagcggtcaaacatgtgctaaaaagtcaacggtgtcaaataaaacgaaacggagggagtaccattcaaacttcaaagagaagcagattaaggaggaaactaaaaggggagaaagaggacgagttcagagaaatgttctgaaggcggaaacaattgacccggacaagattgaacacactggttcagacatcttagaccgggcaaatcatttttgtatacgtctgatgatgaatgactcgctggcgatttagacaggacagacgctgaaccagaattggacaaaacaaacacacacatagcgccaaatttcaataaaacctttccaaaatttgatactgtcaatatttaggaaggtaaacgtgtagtataagttatgttccgtacctttgccacgttctttttttttgtgaaattctaggattaccagtgcaagtaatttttagcaatgttttgattgttattactaccattttgatacagcaaaattttggtagggttaatcttgacaataaaataaacatcccatactatataacatctactactatatctataatttcagctttctagctccgaacgcagtgaacctatgttcattctcagggtgcaaaaagtagtcatttcatagtaggagcgaattttagattgggttatttataaggctaagttttaatttaaataactgtatatatccaattgaatgtacacgtcagataaataatactcctacctttctctctcgaaaaaaaaatctgtagccatttcgttcagaatcacggcggaccgccggtcgaacgctcgaaccgcattgccagcgtcggcgggagggacggtggcgtggaaagagtgcgaacggcccatgaaaaaccggcccaaacatacgggcctcacgtgggccgcgactcccttgcggccctcgggtttagcgcaacaaaaccgacgacgaatagtaaacgggccacaacggtctccgtggtcgtcgccggcgatagggaattgtgaaggctctgcagcctcactgccactgcggcttctcgccaaagatctccatttttttttattttttgcctaagaaaactaagagaagtactccctccattttcagtttataagatattttgactactactttaaatttgattaaatttatagaaaaaataataacaactctaatctaagataaatttattatgaaaatatatttaattattggttagatgaaactaatttaataatataaatattattatacttgtctataaacttagttaaactttaaactttaaatttaacgttttataagctgatacggatggagtaacaaacataaatcagttgagagtgagagggacgtggaaaagtagagccatccgcgctaaaagagggggggggggggggggggtgggaggggaggcaaggtaggcaacgccaagaacggcaaatcgaggccgggattgaagtgcggcaatccagcaaccaaaccccttccatcgccatggcctacaccgagcccctcctcctctccgcgcgccacaccacccaaacctccccgcgccaccacctcctccgctcccgccacgccgccgccgccgccgctgacggtcgtatggttgtcgccgtgcaggacgacgagaccggcgcgctcgtcgccgctgttggcaagggcgatgaggatgacgacgacgacgacgctgtcgccggggaggaggacgaggacgaggacgacgcgcccgtggttcgaaccgcgcgcggggcgtgggaggtgttcgcggcggagtcgcggcggctgtgggcgatcggcgcgcccatcgccttcaacgtcatctgcctctacggcaccaactccaccacgcagatcttcgtcggccacatcggcaaccgcgagctctccgccgttgccatcggcctctccgtcgtctccaacttctccttcggcttcctcgtgagtcctccctccaaatcctccatgcgcatccatcgatgggattgagagattgtaatttgggcaatggcaatggcagctcggcatggggagcgcgctggagacgctgtgcgggcaggcgttcggggcggggcaggtggccatgctgggcatctacatgcagcgctcgtggatcatcctcgccgcctccgccgcgctgctctcgccgctctacgtcttcgcggggcccatcctgcggctgctggggcaggaggagagcatcgccgccgccgcgggggagttcacggtgcggatcatcccgcagatgttcgcgctcgccatcaacttccccacgcagaagttcctccaggcgcagagcaaggtgacggtgctggcctggatcggcttcgcggcgctcctcgcccacgtcggcctcctcgccctcttcgtctccgcgctcggctggggcatcgccggcgccgccgccgcgtacgacgtctcctcctggctcaccgcgctggcgcaggtggcctacgtcgtcggctggtgccgcgacggctggacgggcctgtcccgcaaggcgttcaacgagctctgggccttcgtcaagctctccctcgcctccgccgtcatgctctgcctcgagatatggtacatgatggtgctcgtcgtcctcaccggtcacctcgacgacgccgagatcgccgtcgactccatatctatatggtactccctccttccctagatatttaacactgttaactttttaaaaaatgtttgaccgttcgttttatttaaaaacttttgtgatatgtgtaaaacaatatgtatacataaaagtatatttaacaataaatcaaatgatagaaaaagaattaacaattacttaaattttttgaataagacgaacaatattttaaaaaaagtcaacggcgtcaaacattttggaatgaaggtagtataaaacactaccatcaatgattatgttgcgatcgatatgaatgataaatatacatatgtttgatgcagtatgaatataaatggatgggaggggatgctgttcatagggctgaacgcggcgatcagcgtgcgggtgtcgaacgagctcgggtcggggaggccgagggcgacgatgcacgcggtggtggtggtgctggtgcagtcgctggcgttcgggctgctggcgatggtgctcatcctcgccacgcgcaaccacttcgccgtcatcttcaccggagacaggcacctgcagaaggcggtggccaacatcgcctacatgctcgccgtcaccatggtgctcaacagcatccagcccgtcatctcaggcaaccattcacatctcagcacttcatcatatactacctccatttcgaaatgtttaacgcagttaactttttaagtacatgtttgaccgtttgttttattcaaaaaattttgttaaatatgtaaaattatatgcctacataaaaatatatttaacaatgaatcaaatgataggaaaagaattaataactatttaaaatttgttaataagacgaacgattaaacatgtgctaaaaagtcaatggtgtcaaacattttgaaacggaggaagtatataattgactaactaaattccgatgaactgatccttggaagaattcattgtctacttctttttaggtgtggcggtcggcggcggatggcagggagtggtggcgtacattaatctggcgtgttactacggcttcggcctccctctcggcttcatatttggctacctcttcagatggggtgtgaaggtaaaattcagttcagttcaaaatcgtctcactactactacataaatgaatcatgcagtcgagcatatatatttaattttcgttttcgaaaattctacggaacttgcagggcatttgggctggcatgttgtgtgggacggcaatgcagacggccatcctcatgtacatggtctgcaaaactgactgggaagcagaggtgttaatcacagcagcatttttattcacgttatattcttactcgtagtagataataaactcatcataattgccatgtttatgctggttttacttcctgcagtcagtgcaagcgttggagagggttagattatggggagggcagccggagcacgagaagcttccgacgtcagagccggaggagacgatcatctagatagacatgcctccaatttttcatttcatttttttttgctaccgctgttgctgtttaattagctaggaggttagttcataggtgagagtatccatggaagagaaggggattgaggagtgagattttttttaggcttttgtgaatcggctagcttgcagtcacactgcgcatatgtgtaggattagtgataggccgcaactaagatggttaactaattaatcattaggctcgatcagtatggtttcttgtacactgttaattagtccgttactagtcatacacttgtgacaaattctgtaccgattgctcattctttgcactggacggttcgacctgaaagtagcagttcgatgatgtgcagattgattttctaacgtctgaccaataagaacgccatcggtgctgggaatgcatgccatgggcgttgatgccatcggtgctagcatcatactccaggctcgctcatgcagcacggccgtggattccccacgaaatcaaatgaaatggagatggataaatgaaccaagctgaaatgttgaaacaataagggcccgtttagttccccaaattattttccccaaaacatcacatcgaatctttgtacacatacataaagtattaaatatagataaaaagaaaaactaattgcacagttatagaggaaatcgtgagacaaatcttttaagcctaattaatccgtgattagccataagtgctacagtaacccacatgtgctaatgatggcttaattagtctcaaaagattcgtcttgcagtttccaggcgagttctgaaattagttttttcatttgtgtctgaaaccccttccatttgtgtccaaaaaccccttccgacatccagtcaaacgtttgatgtgacacccaaaaatttccttttccccaactaaacacaccctaagaatgaataaaatggaatgaagaaaaataatttattaataatgtcagacatgaagaaaaaaaagaaaaataaattgaataaaatggaatgaagaaaaataatttattaataatgtcagacatgaagaaaaaaaagaaaaataaattgttaataatgtcagacatgaagaaaaaatataatgtcagaagtgggatttgaacccacgccctcgttagaggaccagaacttgagtctggcgccttagaccactcggccatcctgaccgtcctgtcgttctaacttttttagcttattaatccatttaaaatgtgggagtattcacgatctgaccgtccattacccgtcactcgcatcaacggccatgatcgaacatcaaccctagcctccccctctacaaatcattcccttcctcgttccctcttccaaaccctaatccccctccaaaaccctacacccaccccctcacctgcggcggctgcggcggcggcggagagcaacatcgtcgagtcgacgccatgaggccaccgcgaggtaagcatccgaaaccctaggattactccccgtgttggtcttgcgctctctcggctcgttttgaatcttacgtgatatatgctttggtttcagggaggggattcgggaggggagggagaggcgatggcggcggccgcagtggcggcggtgggaggggattcgggaggggcggggacagcggagggagaggaggccgtgggaggggaggtggcaggacgccaaggggccgtggcggcggccgcggtggcgggaggggtggcatgaagggcgggagcaaggtggtcgtggtgccgcacaagcacaacggcgtcttcatcgccaaggccaaggaggacgcgctctgcaccaagaacatggtccccggcgagtccgtctacggagagaagcgtatctcagtccaggtccattgctgttaccttctcctcctctcatttttttgttcctcttttgtgcatcattcgagatataagctatagtgttacatgtagaaattctcttttgtgcaccattctctactgagctactataagctatcttgtatatgtaggaatctgtaagataatgttctgtagaagtctgtatgttttgttgcattgtagtgtaccctgcaagttatgcttattgctgatgtttctgcgtgaacagaatgaggatggaactaaggttgaatacagggtgtggaaccccttccgttctaagctggctgctgctgtgcttggtggtgtcgacaacatctggattgtaagtttttttttgttgttgaatcactgtgcgcagtagcttaggccgaagtgctaatgcatcagtatggttgtcagatctttagtttagaagagcatcacgtgttaatcgttgtttcatgatttaggctcctggtactcgtgtgttatatctcggtgctgcctcaggaacaacagtgtctcatgtgtccgatattgttggaccggtgagatgtcatttgctatcctcatttcttattcaggcaacatatgcaatttgcctttgctaattgtgtcattttgcagactggtttggtctacgctgttgagttctcgcacaggagtggtagggatcttgttaacatggccaaaaagaggactaatgtgatccccatcattgaggatgctaggcacccagcaaggtaccggatgttggttggcatggttgatgttatcttctctgatgttgcccagccagatcaggtatacctttctcacactatgatttcagtaccatgagattgccagatttattatatgattacctgtatttaattaaccgtttgcattacttgcattctttggcttcttctgggctgcaaatgatgagcttactcggattccccttcaggacatcaaattggatgatgcaaattcgagttcctgatgcgctaacgcccattatcacctgttctttatgtgctgctttctttaaccatctttgttgtcagcatgcattgctgcatgcaaccttctttataattccatctcaatatttgcagttttcatatctcttagctgttcgaattccattttgtgtttaatttccatctcaatgtgattcaaacatgttgagtagtaatcccgtattcttctgtagtataatagagtatattgtgacaggaagctgcattctttctatcgaaccacttcattctttctatcgaaccacttcttttatttgacatattttttgtacccatccttttgaaattggttttgaagtgttcaccttcaccatggttatggatttcttttggagcatttggtggcctcaatgtcttctattaatttgtacacttgtgttgctttgtctggctgtgttacgcatctgcagatttgcatgttagtgccatcactatttaccttgtccgtcattatttaatgttttgataggggctttagcaaatgaggaacttactcggattccccttcaggacatcaaattggatgatgcaaattcgagtttccaatgcgccgtgccttcattgtttctttcctttgcgtttatgggtattctgaataaaatattttgactgtgctagcaatttgccttatgcctgttttattctctcgttagttgtaaaaccttcagtatcgaagttgatgcgtgccttattggtggccaatagtcatgtttttgtccatattcatttccttggcatgatcttgtttattttcttgactacatcagctgtggtaggaatttataggtttcctggtatagcgttctctcctattgttattatgttttatgcctctttgatagtgctagttaggaccagattgttatgtttttgctttgtaaggagtaatgaatactgtggagataaaagtttacggttcatatttctgtactgaataaacatacttgcagtagtttctataaggttgctgctcgagttaagagataatttgtatcccataaaattacctttatggaatcttccttggcatgtccctgtgttaaaaatcgtgaaggttctcacagaattcagttttgaaaccgtttgcaattttaatcttctactaccctgcaggctaggatcttagccctcaacgcatcctacttcctgaagaatggtgggcattttgtcatttcaatcaaggtacttttggtctttttttctcgctcctgaaacctgaagttaatcacgtttattgagattgcggagacagaagatgatagcagcattggactgacaaactgtttgaacaggcgaactgtatcgactccaccatgccagctgaggctgtgttcgctagcgaggttgagaagctgaaggcggatcagttcaagccgtcggagcaggtgaccctggagcccttcgagcgtgaccatgcctgcgtcgttggtggctacaggatgcccaagaagcaaaagggcacatcttaatttaaggatacggccatctgcggtcaaagctcaaatgtactagtagaactttttataagcgttagcgtttttgcttaagctattttaattagttcatgctgctgctggttttacagcaatccatgtgtaccgcgaacagagaagttgaaattggttgaatcgacgctaccgattaactatcctctcggccaacttaatttcatatggcacaatgtcatcacgaatcatcatggatgtgctactagcaaaagctttgtatgtgctggtaggtttcacgcaatggcaactcctaccacggtatttgatttaattttccgttgggcaaccataaatggattaaagtagcagcaaaacctgctgctgtaagtggtttaagggagagtgataaaaagaggaatcatcaaggaataatccaggagtatattttgagtaatatataggaaaatggtgcacgtggaactctgttgggccgaaaagaaagagagaggctaggcggcccattggaccaaagggaaaaccgctcgcggacgcagtggagaggagagagaaagaggcggtttcagaagcgcagagagagagagagagagtagaaaaatctccgcacgcaacgccaatccttccttccccttcttctcgcgagagagagagagagagagagagagagagagagagtagttcagttcccattctcgcctgctttcctcactcgcgatcgcgactccccccctcctcgtcgccggtaaggccgatcttcctctcccctctgccgatctgcgattccgggtttctcctcgcgtttctcggcaaccgctggcgactagctttttgggagttgggacgatcagttcttaatccctatgtgattgttgttgtggttgcgatttcttaattcaccgtgctgttattcgggtagcgatttcttcatcagtcaagtttgattagttgctctctactagtaggctagtagcaagtacttagacttggcaagactcgtattattacatctactgtggtgtaatataggcttgcttcagttggtgtatatacttcagtcgggcttcgatcaccccaacagttttatccctgtgtctctaggtataagtggctctgtcgttagtatggctagtgaaattctggttaacagttgctagcttctttgtcgaattgtaaacactttccattatatgagttgcttgtttacctacatcgatggcttgtttgctgcctagtctcttctgtatattatacacctcacagtttggaaatataagtagcgattaattctgtattgttttagttgcttgaattcacatactgtatgcccatctcggaactattcgagtacacctgccatgttgggctggtttggttttatgccctaccaaaagcttgggggcgagttttgtcactaccaaaatttttggtagggtagagttagaatgatttgtttggattgatgccaaaatgtgactgtgagaaacaaatatgcgggcgatgccaaaatcttgttagggttcaattttgaaattttgatgggggtgtttggtttgctacccaccagatatcaaaccaaactagcacattcttttgccttgtcctttgctttgagtttttttttctttctaatacttgccttcgtaggttatcaaatctaaagacatcaccccatctaaattaactttcttgttatatggtcttcaataatggagtcttctgactttgattacaggaagatggagcctgatcagagtggtgctgagcagacttctccacgtgggaatgattgggaagttgtccaacttactgcatcaacatatgcatctgcacctggaccaagaatgtctgagccttctgatgaggctgaagtcaagggatatgacacaaaaggggatgattcagctgcagcactgttgatgtctggtcatttctcggtttcaccgagtgaggttgagagtctccttaggggcactgacggcaaagagcaccagaaggagctttctggccaagatgcagtttctgccgaaggtgatgacgaaaaattccaggacacctgtgagcataaactgaaggatgaccttcactggattccatcctttgacaaagggaaaaacctttccctggttgacatggagtttgataaagcattccaagggatgggtttggttggtgaggaaccacttgggttctcatcatctcgttacaatccaattgatgctaacaatgagaagaaaactgaggagccaactgtgcaaaatgtgaaccgtgtcattgattcatccaaggttgttgcatctagtgaacaaaacaaacctgatgattctgaatttccacacgaagcttcatggaagaagcaactcttatcactgtacaagaatgtgaggaaaagcaacaaattctggcccatcgttgttgctactgctttggtgggagtcacatgtttttggaggcgctggcagaagggcaagttgcagcatcagccggtcaaattgtatcccagcagcaatgaggtaattgtgaatgaacatctttgtttttaagaaaaaaaatgccttcctttttttcttttacaaaacgtgagggattttcctatggtcaacaagtaggtcggtaggaatgtaaggacggacttgaccagtagcagacatctttagttagaatcaaaccatatgcatcctcttgcaggacaggggcaggcctagatatttgatcgggaagtatgctgtggttttccccccgaccaatatgaaggtttctattatcacaaggatgtcttatagcacatactgtaatatccctttacaccttaagggcttgtttgggtaggccgaaatcatggtcaacacatgtggatcctgtatttgaggcccatccaaacaaatgctgttctgataagtatcttaggttgtaatgctaagtgagaaacacatggtgagggacaccttttttcaagtaactagaggattcccctcgcattgcagcgtaagccagaaagtcttcatagtatattacatttgaagggagcaagtaactgaaggcatgaatgatggttgagattaaactcaaagagagatccagtggcctatgttttttaggtgatgtggctcaatgcattttgagcatttggtgctaattatataggaatacaggatataagataagattgtttattttggcctccatggtttgctgaaatccagcatgtttgatgcttgttgcggcaattctgattttactggttatgaagtggttgctatcagctgagttctaattaacgcaggcttctgttggcttttcagaaaattaaccaagctgtaggaccgttgaatcgcatcaaggacatccttgttgccaacaatcacccagctccagctatccatggacatgctcgattgagctgattatgctcaccaagtcccgccaacatgctcagtttatgagacatctcctgaatatgtacccacttgagtcatcatcatcagtgaagaatgaatgcactggggcatcatctactcaatactgaaaatcgtctgggtgtttatgcgttgaagttatgtaattgattcaaacccccccttggatttgtatttatgtgtttagtgtgattcatcttcttcctcttttgagagtactgctcctggtttgtcaattgcagtgccctttcaggttgctgcagaaaacttgtatatatatatatatatatgatcatttaggttgatgatgtttttggtctgtctgtgttgtgtgatcctgcttatattgtcaacacttacgtttgatttcccaagaacagtttagcagaagctgtaactcgatgagtcaggctttcagataccaaagctttgattacatcacatattgtagtattgtctgaagccactactgggtctctttttaaaactgtgctatattccattttgtattactagcatatcatgaataaatacataattaccccacttttacattgaagaagacaaaacaactccatttgaggaatgtgttgggtacccattggctgacagtatggaaattattccttgtctgttagtattagcatagaataatcttgccccaatcgtggtggctggctggccgaaataagaattgctgcaatggatttaagaagattgtttcaatcatgttcctatcctaaccacatggacgcgtttttgcagtgttaaactgaccaagcttgcaggcttctttagaggataataatagtacaaaatgatggcaattatatatataatacttaggaggagagtgagacaccttgattaacaccacacttaacactttagaagtagccaaaaaccagagtttggagatagccccagcacatgtgggtgttggtgtcatccccagatgattctgatggggacaaccaaccaaaccccaaaccttgcaagaaaaaaggattatgatgctaacaactgacagcaaccaaggtgtcaccctaaagcattagctggatttttctcatcttccaattatcactgcatggttgttacacctgcaacacagcatctcatcttcttctttttgtgtgtgtgtgtgtgtttctagaacaacaaattacagtggtcactcacagtgactgcaatcagcacctactttttcttggacatactattacttatcatccttttttcctatccttttttttcagtagacaagaagtatgcatcaacgatgttatgttcttttccagtgcgatgaccaagtctacgttgaaacaaatggacttctatgctgaaatacaatgcagtggcaatcaacttattcacagtaataagggaaatacataaattaaagagaaaaaaatgttactatcaagttgattagacagatacacagttcttaaataaaccaactagtatttcattaaacagccgcttgcattggaatctggctaatcacttcatcagtacccagtcctatcgttaagcaaccaggccatcatttttaattatttttttctcctccaataacaacaaacaaaacgagccctctctctctcaaaaaaaagagacaaaaaaatacagataaacaaaaggagagcccgtcgtgtacgtcgttagaacagaaccaaaaaaatacgagaagaccactccactaaaactctctctcatctgactccccccatgaaaagcaatcgcttttgtttgtatctaccaaaatttgtttgaactcgtcaaacagttgacttaaagacttgagttacgcacgcgtgagaaaaccttcacggaactctgcaaacacaaatatacgaatttcacattcgtacgacttgaatggaatttttacggaattccagattttgaattttgaagtttggcgttgaaaagattattacagtagaatacaataataatttctccgtatgcgtcgcgtacgaatggttatacggtggagtttggtcaataaagaaagcaacggaatggaagctgtgcgtgatgatttcacgagcaaaagttgaagaaaaaaaaaagagagagaaaaatgtttttgtttgtttttccaatgggaaaaaaaggtaggtgggccccacccatctccagctgcacgagggggcgtgcagtcgccggctacctcagaagccctacccgcctcgccgtagtgcgaatgacaggtgggcccgggaaccgcccgagcgcacggatagcgcgtacgatgtggggtgcgtgcgattattattatcggctgcctccacacgcacacgtgggatagtgccaccgggccctctccctgaccaaaatgccctcgcgaactccttccattttacgatactgccacctgaggtcaacaaccaaatccattttcctcccattatattctcgtttcacagcggtgacacacggagaaaaaaaccaatattaatttcggtaaaatacgaaatgactaatatgcccatgccctaatccccttccgtgtcttgtgcttctctcttccccggcagcgcgtccatcgaagtagtagcatactactctctactcctctcctctcctctcctccgctttggtttgctccgatctgcagcgagagcgggaggtcgtcgccggcgaggaggcgcggcggaggaatcctctccttcccgatcccgtccggtgcttcctcttcttggtctgcgagtaaagctcggccgccgccggcgacgaactggtttggggagagccacgtacggcgccgcctcgaatcgaatcgaattggaggtatcattccttctcgtagaggcacctcctccaccgcgtgtggcttgatgagcgggcgtggcgtggattgggaatccatcggtgtttgtttggtcgattgattgattgatttattttttttccttccattaaaccatcgtttattcgggatttgttcatgcgtagtggtagtggagttgtaatagcagtttgtttttttttcgaagaagaaaaaagaaaagaaaagagggaatccccgtgcctcacgttacgtggcttggaattttctttttttgatgatccattcattactggatgatttttttctcgattaaaacgtttattaatcttgcaggttgatttgactcgttggttggagcgctccatcgattaagcagacggagtcatgcttcttctttgggtataaaagtttggatctcggaggctcgattcaatctctggagtgggaacaatcgtttgctcgtggtcgtgggatagctcctctgcgagatgcagagtgggagcgagatgagacccgtgcacaacagtgtcgacacggtgaacgcggctgctgttgccattgttacagccgagagccgcacgcaacctcaggcagagccggttcgtgcctcactccctgcttccatgattttttttttcatgtatgatatcttcgttgcgtgattcagctgggtcatttaggtagcttacttcgatgatattgttgtgacggcgttcttggttgcttggtggtgggagcattactcggttgttttttagttaaggttgctgtatttagtaggcaaaattgaagaactgataggcaaggtacgttttgtagtcttagatgtggttttacgctagagtgttgatgtattggacagtaaacttgcatttttagggagaaactgcgtaagtggatctatgagtgcaaattttctttgcttattcatcacttgttgacttgcaactaatttcttgtccaccgtctttaacttttacaatatatcagaaatttttagcacttcaaatcgaaaatataacataaatgctgccaggattagttcctgctgtatatttttctagctattgcaatctatgattcatttatccccggtatatattaccatgtttgaccttgaatgaaacctatgtatcaccttaaaacattgaaaatatgcatggataaattaccattataaatactgtgagaacaaaggaggggaattgttgaaactgtcagtttgaactcttcagaggaatagatgggaccaaaagattcttcctgtgctggccatatgcaagtatgcaaccagccattattttattttaacttgctgaggccttggtcattcttgttttttttattacatggcctgctgtttgggctttcatctttgtatattattaatttccctctgagattacctctcatagggaaatgcagcactatggtgctcattcatgatagccactctccaggctatttagttcgggttatctcgtggctatgatcatttatgaaaccttcttaatgcttttattttgaactggaaagtcattacctggctaatgggggatctatgacgtaattttgatgatttgtggaatttcatttctagtttttcgttacggttacatggagcctaatagctcgatgatgctatatttctattgccaacctgtttacatgttcacgttattggtcatcctaactctgcaatacaatcgctatagaatgcatgtctgacaaaagctaggtgcaggctactgtactcgactgtgcttatgctgtttatgtgccaaatatttatgctacaatagtaatcttcttaagtcacatttcaggaggattaagactttccttttgaattaaatagtgttgttcttttgcagcgaagaaaatgggctgattggttgagtgtgtacttctgctttggatcacagaaaaatggccgacgcatcagccatgctgttcttgtcccagaacctttacctccgaggacagatgcacctatgccagaaattccaatccatccgccacccccggtattcccctttgtcgcacctccatcctctcctgcttcttttctccaatcaggaggtgcatctattgtacaatcacctgttggtgctccatctttttcgcctctctcgccaaattctccatcccccactgggccaccgtccatctttgctatcggaccatatgcacatgagacacagctagtctctcctcctgtcttctcagccttcacaactgaaccttcaacagctcctttcactcccccaccagagtctgtgcatctgacaaccccttcctcaccagaggtgccatatgcaaagctacttacctcaatcaacaacagcaaaaatgctgaaacaggtgagcttcagtcataccagatttaccctgagagcccaataggacgtctgatatctccaagctcagcttgttcagggacttgctctccatttcctgaccctgaggtgcagacttcctcacgttccacattcccctcattcccagttcgtgagcctccaaagatactggatggcgagggaattgcaacacagaagttgatacctcgccatatgcgcaatggcggttctctcttggatggacatatttctgctgctgtaccagtcgtagacttctctgcccgacttcaaaataatgatcatgctatggatcatcgggtttcatttgagttaacagtagaagatgtagctcgctgtcttgagaagaaaaccaacattaatggggagtctgctgcagcttcttttcgccttgtgcccaccggtaacggagatcacattcatcccagagaatcgaatgatacaagagcagggctatgtgttgatgaaacataccatgatctgcctgagaaagcacggcgctccttgtcccttcgtaaggctaaagaattcaagttcaacaatgttgatgctcctagtgtggagccgagcgttggatcagactggtgggcaaacgagaaagttgctgggatcacatcagagccaaggaaaagctggtccttcttcccagtggcacagccaggggtcagctaacagttgcactgaccataatcttacaagatgaagaaataagcttctgtcatttttgctcctgctgtttctcagttccccagataccatcatcataactgcaggagatgcaaacttatgcaaaatattccagttttagcggtaagttggagttagttagtaactcagtgtccagctaatatcatcataagatactaaaggtgatgcagattctggaacctgttgttataaaaccataatacttccatggtgtagcgtctgttgtatcctccttaactgactggctgttctgatactgatgctgtttatgtacataataaactagcgaaaagagtagaactcttcctagcagcagtgtattgtcagagtggagcaagcaaatgactctgatcccctcttcaattagttgtgctttggctttagcagaagaaacttgaaaatattgttctgtcgtgcttaccagttcggcaagaatttcaattctgtcttggcatatgtgatgtcacatctcttatcacaaattctgtaagcaacactattttgttgtgctctgtatattaaattgggccaagtgctgactgtttatatttgaatgtttgattacccatggtcattctgaaatgagaattattctacccttaacttaatcacgtcatttttttcataattaatggtgtatgaggattgttctgttgtagttgctgagcctggataggaacaaaagagctggaaaaaaaatcaatcagagctcttacgttgtgctggctagaactctggacgaaattcattgatggcccgccagagattacatcaagatcacgagacgttgatcgtgcacatagagaaacccgacgagcaataattatcactgatatgtcaagatttaatgaccccaatgcttgtcaagagacgcatcgctaacgaaaatattttcccatgcattctcgcaagagatgagcatatgcgtatctatcaatcttgtgttgcttctcataattatccacgaaataaaactatcagtacgattggaattatatagcttggatgaaataatgtcaatccaggagagcttgaactaaacagaacagagggtgttcctgatatttgtttttgtttgggtcaaaatcaatctacgtccaattgaaaccgatgaaaacgaaacacaaaacagcaaatatcatagtactgttcctattaaaaatggaaacaagaaaaatgcagcttgagtcaaaatccgcattaagcacggagataaacttaattaagcatgggtgattaatggaacagaaagatttgaggccatagctgagggagagagagagagagagagagagagagacaatgccacaatggtgaggataacgttgatctatcaccaaacccccttgtggcccctttctctcacctcacaaatcaataatttaggcctctcttcgccgccgccgtctcaccgccggtgagcttaagctgaccacgattgcccggcctctgtccctgtcaatgggccccgctgcgtggttaatattctccctgatcaatcattgcctgcccatatcaaacatgctcactaattaaattgtgagagggcgaagcagaagtgatcaacttccaaacttgtggtaaccaatcagtaacaggaactgtcgtcacaggttatactaccatagcaccatatcttttatttctctataacctatatgagatgcaatcgtatataatcattatcgacccatctggttatagataaatgctagttttgactttgagttgttctacttcgaacaatattttttttaataatttaactatttagcattaaaattatgccattagatttgtaaccagaaatagtttactagtactatcttacatttaaatatattcgctttgatatcacttagaagcaactgttgaaattcatctactatatttgtttttttaatacataacgttattaacttttgaaataatgtttgatcattcgcattatttaaaaatttactcctttcattttatattgtaagtcgttttggctttttcctagtcaaactcgtttaagtttgactaaatttttggaaaatctaaaataccgaattggttttatttaatctagcattgaatatattttgataatatgctattataattttctatatactcggtcaaactcaaataaagttgactaaaaaaaagttaaaacgacttacaatatgaaacgaacggaataatatagatatgttaagatataagttatacttaaagtttatttaaagataaaacaagtcatatcaaaataaatcatatttatatatattataaatggacataggaagtacaatacttgtgttgagatccgtcaattatttattaacagagaaagtataatgcctttatattagagtataaataaaatgcccctaagtgtgaatttagtgatataatattcacgtagacaatttagctgagtttgttatattggtgaacaagctgatgaagaggcatgaggtaataattcatctgaatatgttactagtagtagttagtgatattttaagactcagcagagggtgagaaacgttccacccatgcatctctttgcctgtcaattagtgacaataatagtatacaaaaatcagctgatatgaaagcaacattcttacatgtggcggtgaatcatcgttaccaagtaaaaaaaactctgtggtaataacatgatcgtattgtcaagtttccaggagaaattctcaaatataaacccagaaatcaaacattttattccttgtgcagctaggatccaatagagacatgtctgtagtaatcatgttcatgtaaacaaatgaggtgagcagaccgcagcgagtgagctcacatgcgccaaccatttttctgcacatgaaaatacaagaatgtttttttcttttttctttgggtgtacacatcatcctcatcaatgagtagagagaagagtagagggtagtagagagccaaaaaaaatcgatcatggagaggccatgtggagctcgccaagtgtgagcatttaccttcttggaaagaatcccaagctagaaatccacagaattatctgctctcaaacattggctcatctgctcaacaatcctatcctcctcctcctcctcactggcagtgattcccccaaccccatttctctctgaattgggcttgtttctttgctgaattattattttgctcattccactctggttgcttgttcagagactccatgtacaattagttgaccattcttctagttagcttctcttgtgttcttggagttggagctggtctgtccatgtgagccatgttgcagattgggctagctttgggagcaagagagtggtagatcttcttcttgccagatttattgtagatacaatacaatcccatttcttgttcagatttcttggtgaaaattcctagctagatccatactttctccagtgtagtgtgtagagaagaagaggccttgtgaatcttatcttgggaaaaagaggtatatccatccacccatctgtgtgctgttcttgattggcggcaatggcgatggagccgacggtgaaggtggcgctggggacggcggcgttcgggatcttctgggtgctggcggtgttcccggcggtgccattcctgccgatcgggaggacggcggggtcgctgctgggcgcgatgctgatggtgctgttcggcgtgatgtccgccgacgaggcgtacgccgccgtggacctccccatcctcggcctcctgttcggcaccatggtggtgagcgtctacctggagcgcgccgacatgttcaagcacctcgggaggctgctgtcatggcggagccagggcggcaaggacctgctcgtccgcacctgcgtcgtggcggcgctcgcgtcggcgctcttcaccaacgacacctgctgcgtcgtgctcaccgagttcatcctcaagatcgcgcggcagaacaacctcccgcccaagccgttcctcctggcgctcgcgtccagcgccaacatcggctccgccgcgacgcccatcggcaacccgcagaacctggtcatcgccgtccagagcggcatctccttcggccagttcgtgttcggcatcctcccggccaccctcgtcggcgccgtcgtcaacgccgccatcctgctctgcctctactggcgccacctctccgacgagaagtgcgtcgaggtcgtcgccccggtccccaccgacgtcgtcgaagaggaggacgtcacctcccaccgcttctcgccggcgaccatgtcacacccccgttcctcctcccaccaccaccaccaccagcagcctggcagctcgctgtcgtcgcctgactgcgaggtgttcgagccagtgaagcccgtccctgtcaccagcaatggcgactccaacaacaagccggacgccgccgacgccgccgtcgtcgtcgggatccaccagaggcgcggcggcgtcggcggcggcgtgaggatgaaggaggaacatgcgttccggtgggtggaggagaaggaggaggccatggagcaatggaagagcacggtgtggaagacgggtgtgtacgtcatcacattgagcatgctggtggcgctgctgttgggtctcaacatgtcatggagcgccatcaccgccgcactcgccctcatcgtcctcgacttcaaggatgcccgcccctgcctcgagaaggtaattctgaattcctgatgctgaattgatgtcaaaaacgaaatttcactgaattctgatgctgaattgatgtgaaaaacgaaatttctctgaattctgatgctgaattgatgtgaaaaacgaaatttcggtacattttcagttgtttatggactgctactagtatgttcattcttgctcttattttggaaaccaatgtgttgtcgctctcactcgctctgaattctggagctgaattgacgcaggttgtatgaaaaaagaaattttggcaccttttttttccttgggtgaatttgtttacaggcaatccaatcacttcgattggtattctctgcgaaacagaagtcattactttggtatttgataatccaatcatactgaactacactaaatttgttttcagtatacaatccaatcatgtagcactatgttcttattacttctgtttttttcacatagcagtagattgccattcattttgaaacaagagtctttacttgataatccaaacatatcgaactacactgattactttgtcaagttccttgtcaccttgatgatagtactttggtcttgattttcgataacatttggttctgtcacatccctgtgttgttgctaaattgaagtaattgtgtgcaccaatggctctgctgttgtatttagtgttggttttggatacctaactgatgttaacttgagttgttaactgtagttttgctgaatgaaatttcaggtttcctatccacttctactcttcttctgtgggatgttcatcactgtggatggattcaacaagacgggcattcctagcgcattctgggaattcatggagccctatgcacggatcgatacaccgaccgggatagtaatcctcgccctggttattcttctcctctcaaatgtggcgtcaaatgttccaactggttagttctgccctctgttcatggtcaataatttcacatggcacatgtagaaattttcatccttgttgttactaatccatccagattttaaacaataactaagtcaaggaagcagcgtagacttaacgatacatgtgcttcgcactttccatgctatgcttgtcaagagtagaaaggaaagctgcttctttttttaatggaagctcacaatgccatatgtgccatggttgtctagcaatgaagcaacatatgagaggaaaagtttatctgtcatcctgcactttgcgcaattctcgcttccaaaaaaaaccagaaaatctccactaggttcactcacctactcatgatagttaatagaacaagatatcaaagaacaataggttcattttggagtctgaatttggggctggttctaaacaaagtgtgaatgtcatagctgataaccatgaagttcttatcagttaaagattgctctgtcctagtttcttccagtgaccagaaaaaaatcgtacaaaaatcagttgggcattctttcttttgatttcctgattcatgtatatacctgacaaatctcattgcagttctcctgcttggtgctcgggtggcagcgtcagcagcggccatctcccctgcagcagagaccaatgcctggctcatcctggcctgggtcagcacggtggccggcaacctctccctccttggctccgccgcgaacttgatcgtttgcgagcaagctcgcaggtcggagcagtacggatacaccctctccttcttcagccacctccagttcggcttcccggcgacgctcatcgtcaccgggattggcctactgctcatcagaagcaactgaaaaatggtacagaacatatatatgaagaagacatggatatcaggacatgtacaaaaagaatgtgaattttcaggtcaggtcgattgtatttctgcaaagattcaattgtgggataaaagaaaaatgtctatctttgcctcggaattaagcacggatatcatggtgcttggaggctttttgagctgtacatttgttagttcatattggggggagaagatgtatatgttgcagtagcaaggatcataaaagggaaatgtatatttttgttcagcattctacttgtaatccatatatattttttgaagtcgaataatttgtataggcaggagaagagaaaatcaatgaaatgcatgcccctatcgatgcagctaatgtgtcttattgcgatttactccctccatccaaaattctcatacacatttcatctttttttttttccaaataagatgctcgtatttgcatttcattcaaggatctgaaagattgatacgttcctctcctctgcgatccgacccggaccgttggaccgttagtgttccatcgaacagccagtaaagccaaaaatgcttatagtttgggatggagggagtattttctatcaatcgcagcggtctaatttcctattggggtaaacaataatatggaacaaatgcaaatattagagaaaaacctaatactcccaacgtcacagaatataacaactctcatcctaggacaatgtatctggacatgacattctatcctaagacaatgtatttggacatgagatatgtctagatacattgttctaggatgggtctcgtcctatcttaggttgctacattttgaggcagaggtagtatcaaataaatagaatgtctgagatttcgaacccatgaacccaaactgactagtacaccactgtcgagggaagatcctcaatagcggggagtcgtgagaccccccatttgtgagttcggccgggggcggaggctcgtctctcggaaatcactcgctcgtccctaagattaccggcaagcttgcacgcaatcggattatacaggttcgggccgctatggagcgtaacaccctactcctgtgtttgcgattatggatgagttttacaaaggtttcttcactctaaaaagcgcgctcactttctctcttctggagttcaggttttctgggcatcgtccccttatctcagtgggcagggtcctccttttatagctcaaggggataccacatgcaccgcctctacctaccctctatcggagggggatcccactccactttgggcttcaaaccgtgccttctcccggaagctaagcaataaccggttctcgagtggaacccggcgccgccccccgcctgacacgggggacagccctgtcatttcctcataaatgaacgatgacttgcgatagcccttcctcgagtgacgctcggatgtgacgggtcatacccacccccactccgccgggtacaagggcgacgtgaggacatggttgccctatccatcggatatgacggtcacagaccggtcatatccgttggacagaggttagctaggcgcgccgcacgtctgcccttaccgcattaaatgcggtgagggacagttggggcgtcgcacatttatggctgttcagcctgtgctcccttctcgctctctccctccgccgcgtggcagccgggtgagggcctcggggcgaagccgtgggagagcccgagggggtgacgtcatgccccgagccccccccggccgcttccacgactcgtgtgacgcgtgagtggggccagcctgcagagtcacgtggccggagggaaagtaattcccctctacttcatataccccctgtcgacgggtgatacccgtagactggatatagagggtattggggtacgttggaacaaggatctacgtagtacgacatcaagcaaacaaaagataagaattatactggttcaggccccttgataggtaatagccctaatccagttgatgtgagattatatgatagaaaacacaggttacaaagagaacaagggaacttgtcggatccggcgagattgtagtcgagttgattcgactagctctcgatgacttggctccttataagctccggcttcgtaggctgtggaggttgtgttagctctgagattcgatgcctaaaccctccccggggggccccttttatatcgcagatgtggaggtctcctcatagaactcggaggtatcagaccttatacgatacgccaacgacccagtcctgcccgagtaggattcttcccatctgtagattccgtgaaaggtttccttagaatatacaggaaatatccgcatgcgcgtgggtatgccatatcgatatgtaacgtatatcgaagggtaaagggtatgcctaacccgtaaccctgacacccccaggcccatatctccgacaaccacctcgtaaagttaggcggaagactcctagacgtttcttgtaatacgggacaaacgatggggttttaagaaaagtgttgcttgctacattgtagttgaagaagagaacgggcgagggatttcggttgcttttaggaggaggaggataaccctttggatcgagacgaaggtgtcagtggccggccaacatcctcatcgacggcttcgcccgccacctcctgaggctccccagtggcgaggacaagctcgtccttaccctagctccccgctttgttgccgggcacaattacaattgctcgcctaggctccgccacgcctcgctgcggtcgacctcaccgctcttttccccagccatagccacaagcatctcaaacccgtgtcgtgaggttgaaactatactgagattgaaaggctgacttgttgggcccacgcttccatccacgttagcaagccatggtggcatgtcacgttgacataagtggcaaatagttaataaatcatcttttctcatgtgtaataaaaaagtaaaaataaatctaaaaaaaggggtatttaaatagttcgccaaacctatcagtgacaaataattaaatacttaaattcctcctttagttggaccaatttatcggtaaataaataagtaataaaaaaagaaatcttatcttagcttccaaaatcattgcgcctcgactcgagtttctctcccccgccgccttccgctcgtcgcgcatctggcgagcagagcaggggagggggcgccgccgccgccgccgtccttgtgcatcctcatcccggtgagcatccgcatcctctctctctcattctcattcatctctctctccctcccagtctcacccacacttttgtctcgaatttgcttgctcgcgttaaccctagcttctcttctagatctggaagaagcttttttctcttaatttcatcagagctttaatctccttttaatataagtaacagtttgttttttgcccccaaaggttttgggggtggttctgtcccaggttggatccgcgccccctggctgtcaccgtaatctttcagggttttcgcgaggatgtcgtggtgcacgattgagtctgatcccggtgagttttagtttatatctctttgtctatatcattagttgcatgttgttcatgggaggtttactggatgctagccaatgtattgtgtttattcattagtaggaaggatggttgttgcctttggttttccatcgattgagcactgtggggaatatatattacctagttttttttttttactttgttactagtatctgtaagccgagggttactttctagtagtaattttgatgtgtaaagtctttactccattagttcatctgactaatatccacttggggtccttcggtatgtgtataatcatggatgaagtaccaaaatactgtgatctcaccttacacatttcattgcgaatgattgagtgaaaataaagctttgatcatgctatcctgagtacatcacagattatcgcagtgcttatttttacgtttcaagtgttcttaccattgcctttccaaaatatacctgttgtttcacctgagtatatgacctgtaggtgttttcaccgaattgatccaggagatgcaagtaaaaggtgttcaggttagcttccagggcctgtttctttcctaccatgaaaaattgttagaaacgaaatctatatcaagtgttcttgatatgtccttaggcttttaattattacttgtaaaacagtgtaaattggatggttggctctattggttgattctactgtttctagaatacatgtttaactgatcttctgaagatatatgctttgcttgtgttgtgaagctaaccttaacctgattgaactcactttaagtaactaccacactatatatctctatgatcagcagagtgtatgctaaacaacgcttatgggaaaacatattgctgcatataccatggagctgtgtgcttgaatgtaataaacaatacccttgtgaaggatatggagtaggacaatacctgtttggtagtaataatttctgaagggaatatggtggccaactagtaagggttaacgaatatacatcacagatcagtgcgatatgtctattaatattgttagctcagctacaaaaggaaaagacctttattttggcgttgtatatacttgcaaatctaatatacttccacttttggtgccctgtccttttatagttagtggtaggaaattctagaaaattgcaacagatggccatggacctggcattgtcagaaaaaaaggccgtcatttagcttcagtttatgactttattaaataactcttagctgccttttacattgctattgtatctttaaacaggtggaagaactttactctcttgatgtggactctattagtgaactgcggtgagtctcttcaattttttgttgtcatgcgtctctgttctctggatggccttaacacattgttgtccacttctcataggccagtttatgggctaatttttctcttcaagtggatggctggggaaaaggatgaacggcctgtcgtcaaagatccaaacccaaaccttttctttgctagccaggttagttccattttgctccgttagctacctctgttcagaattggatttaacatttgatctaactaaatcaatcactgccaggtcatccctaatgcatgtgctactcaagctattctgtcaatcctcatgaatcgcccagaaattgacataggtccagaactatccaacttgaaggaattcacaggagcttttgcacctgacatgaagggccttgctattaacaacagtgattctattcgcacagcccataacagttttgccaggcctgagccatttgtctcagatgagcaaagagctgcgggtaaggatgatgaagtgtaccatttcataagctatttaccttttgaaggagtcctctatgagcttgatggattgaaggaaggacccataagccttgggcagtgttctggtgggcctgatgatcttgattggctaaggatggtgcagccagttatacaaaaaagaattgaacgctattcccagagcgagattaggtttaaccttatggccatcattaagaataggaaggatgtatatactgctgagctgaaggagctggagaagagaagggaccagcttttgcaggagatgaatgagtcctcagcagcagagtccttaaacagcgaacttgcagaggtgacatcagccattgagactgtcagcgagaagattatcatggaagaagagaagttcaagaagtggaggacggagaacatcaggaggaagcacaactacattccctttctattcaactttctcaagatgctggcggaaaagaagcagctaaagccattggttgagaaggccaaacaacagaaggcttccagcacaagcacgagtgcaagatgaagccaagtgccaccaatggctgtaccgaattcgttggttctcattttgaggaaagcatacgttcatgggttactggggttagttgttgcattttccctttttgagaatgcgttatgctatcagatacggcaccttgttggcagcttagagatatcactaagttaatgaaccagagtacattctctttaatctttttctccgtgttgtattattatctgttatgactttctgcccttgtgtgatggatagaaactgtagaagaggtcaattgggtcttaagggtggtggcattgtttatttcgcgtcgtggcaatcgaatagaaaaatacatgttggaggatggaagttttgtgtctagatgctgtcttggaaatgcccacttgctaatcttacttgaattagatagatgctgtgagtgtatccatgaccatgagagagctggagcctagtgctggtagagttgactttcctgagtgaaatcgcttgcttgggttggcttgtagatataagtataagaaaacggataagaaaattcaggcaatgaatctgatgcgcatgtgattgattctggtgggatttctataggacatctgattttctgttgaacagttaacgcaaacgacaggtttgaatgatacagtattcgaacttgttttttttttctcttgtcatcaagattcataattgttggagcatgaatgatctggtgtgcaacctcttaagctctatagctaggacgttgctgtcatctctgttgttgcaccagctaaaggacgaattgtgaccaaaacccgaattgtgaccaaaacctttgggactttcagagtgatctttctgtcgcacttgcacacactcttttgtcattcagagtggttattatccacccattttgaaacaggatttcaagaaattaggggacaaaaagaaattatacacattggatttgaagaaatttagagctggtgtcgtactcctattttattttggtctattatcccatacttatgcagatcagctggatggattgcatcgtcagatattcttacaaaacaaacttgctcaaaccaagaccagattagattagattttgttgtgaatacaaagtcaagcaacaacaaaaaaaaaagagattgagaaagagtggcgagttgcgacgtgaccaatggaaactcgaaaaacagaaaagcgaaggataataaaaactcataaaaaggggaggagggagaaagaagcgagaggcgcatttgttgtcgttgttgttggttccatgccgtaggcccatcgcgatctactagtgtttttttgcctctctcccccctccacgcctccacccccacccccacccccaccactcccccccccctccgcctccgccctccgccgccgccgccatggaagccccgggctccccctacgcctcctcgccggagtccgcccccaagcgcgccccccgctcctcgcccccgcccccgcagcagcaggcctcctccgaaggtaacccgctcgcgcctcccatccccccatctcactctcgatatcgatctctctcaacgtggtgcgcgcgtacgtgcgccctcgcgcgcggtttggtctggatccgcgagatccaggcctccgtgttccgctctgagatcgagatctgcaaccacgggcggcaaatatggtggtcacatggataacactaggccgctgctgatttgggcgtgttctgcgtttgtgtgcgcttgtgcaatggagaggggagatgcaacgatcagttgtttcagtggtagttgatttcatgttcatcttgtccgctggggtgatttggcaccggttgatgttgacgatgagttcatccgatgcgtttctgtgtatgcatcacaagtttattaacatgtccaagcgcggttagtaacagctgcatgtgtgatcatatacaatgagcttacacataagagttgcaatttgatgagtaccatcatttaattgtagagttgagttgaccacatgagacgtataccgatatgcatcgctatctgtactcttactagcgatgacttgctggatgatgccgtggttgggtctgtcactctgttgatgttcagggttttctacttttcgcagtggaaccgacacgtagatataataagtattctaggaattcaaccctacatcttgattgtctatcccacagtagtctgaacacacccagccatttacttaacattgtgataactgatattggatgttgtttcactttgttggttgttggcctgtaaatatattttttcggggaaattgcaattggggaacaagaggatgcttacaggaaatgcgaagtcatgcacactctatttagcaagcacatctcacctttctggcatatgccaatcattaatcttgtccattatggtttcctcgggtctttggttgacacacttattgcctttaaagtgttatcattatatgttggttgttctaatggttcattagttacatcaaaatataagaaatataaagttctcctgatccaccttgagtggaaaggtatttaactcagtcctgtcaattgctgctttcactctgttcgtagcatattcctaccattatgcttgttgctaattcatgttttttaacttgttatatgttcaaggagaatatgatagaccatgccaaaatataattcggtcataatgtgaatgaccctcttgttattgttcccaacaagcatacatgacacaactgtatataccaaacttctaaactacactgactggaaaccaaaattcagtcagtagtggttctacagaacatgtatagttaagtgccccagttggaccattagctgtttttactatgcatcatggaccacttttgttgcttgagttaaaaaaaacaattttgtgcctaaacaaataatggcatgcacagtttttggccctctcctttattgctagtaattctgaatttccaagtgatcattctccacagatgacaaggagaagccaacccatctgaggtttctggtatcaaacacggcagcaggatgcattattggcaagggtggatcaaccattaatgaatttcagtcccagtctggggctcgtattcagctatcgcgtagccatgagttcttccctggtacaaatgacagaattatcatggtttctggtctgtttgatgaagtaataaaggccatggagctgattctcgagaagcttttagctgaggtaaactattttattccgcaaatagttgtatcatagggccatgttactttatttgatgattggtattctatggttactttcccagggggaagaaagcaatgaagctgaagctagacctaaagttagacttgtagttcctaacagttcttgtggtggaatcattggtaaaggagggtcaacaatcaagtatgtaccattgataaatttgtttctggtttctgaaatcttatttttattcttattcccattgcgcttcttcattttcttagttggttataatgtatgtataccatgaagcgtgtctgaaccgaatgaggaaatgcatggttattttcctaatgcactcatctttgacttaactgcacccaagttattgcatgctctcttgtcaattgtacgcaagcagtatttgttgtttcatttgtattgttttgtgttggtttatgtttctttgaatgtgagttgacatgcttgttttctcatcaggtcattcattgaagactcacatgctggaatcaagatttcaccacaggataacaattttgttggtttgcatgatagactcgttactgtcacaggacccttggaccatcagatgcgtgcaatatatttgatattaagcaagttatcggaggacgttcactacccacctaatctgagttccccatttccatatgcaggtaaacaaatttcaatatttgatttggtgtcaaacggctacttttcttattatggggtgccttaattctcggactgcatttcttttctggaattcatatactgcattgtataggtcacaaatgaacatgcttggtcactcgtaccatttggcagccatgagctttctgcatgaatttttattcagctactgcacgattgttctctttccgtttcagtgatcatgttgaatgcgttcacatgctatgtccattcagttactgcatgatcattttatctgaattcctcttcttttgttttcaggccttggtttccctagttaccctggtgttcctgttgggtatatgatcccacaggtgccgtataataatgctgtgaactatggacctaatgggtatggaggaaggtaccaaaacaacaaggttagtgattgctgctgctttactcttgtcttgtatatcactaaagcaaaccttttgaattcaatatcagcatttttatgcacatgttggtatgagctaacatgtgttcaattttgttatgcactagattaaggttatgttcaaggtgatttgcattagatgttctataatagaaatactattttctggttgtggttttgtacttttgtcatacatcactataggcatctagaatttctgcttcaaaccaaccttaacaatagtaagactcattggatgagatgtctgaattactaattgtggtttatttgagtgacatattccatccatttgttcatccatagtatgctttagtacatgttagtgcaaagcataagacagcttttaacgaattgaagtattattacctatgtcatgcatgatgtttttcaccgtaagtaacatcagtgctgtaaattctaattcagaactgtaagtaacgtcattgtactgctttctactgaattccacaaacattaccattcactatttttcctttttttccctttgagtgaaatttgatatatgcgttcagagcttcaaattaatccaacaattgtctgctgttgaaaattttgcagcccagtacacctatgagatcacctgctaacaatgatgcccaagattctctcactattggtattgctgatgaacatattggtgctgtcgtaggacgtgccggaaggaacattacagagatcattcaggtggtttcttgcgctatgaattccacagttattacttttttcggtgcatttttcaattgcttaataccttgtacctatgactgtaccttctctttttttgggtacaaaaggcataatgtttttttttgtagtatcttaggcgaccatattagccatcttcttgagttgtatcaccctatgtcccacatgtcagttgtttttctgcctcagaaatgtcataacctttcttcatgcttcaaagattttgtaattgtcccaactgatggttgtcttccagtgtgatcatgttggcgtgtttttactgaaatagcttgcaatttgtcgagtgcaggctagtggtgccaggatcaagatatctgataggggtgacttcattgctggcacatctgagaggtatttccttggttacttttcaccatcagaacaagctcttaaagcatattgagcaccaccgaccttcatatgatatgcttgtacagcaggcctgaatccccaaattttactgactggtgcaggaaagtgacgataactggaacatcagaagctattcaggcagcagagtctatgataatgcagagggtgacagccagttccgagaggtgataaaatctcatgaagacgaggggcatcatctgatggaaaagaagcctgatgccaagttaggaggaggggttggagattgtcttttctagttttagcactatccgcaaaaaaagcttgagagaaaatttaagataatctattgttccttattgagtctgattgtgttagtaactggagtagtcagtcaatcagctgttctatttatttcttatttttgttgggaataggattatatttcacaacatgtttggctgttgtcataactcaacaacgctggtgtgctaccctagttttgataattgtgatccttaggttacccttgaccccttgtctttgcctgtttgtttgtctcctcaaaagtcgaaatgactcgttttgctgaaagacaaagttgcttcctagtgagaggctgcatcttctgtccaatttgttgcatttccatgatgttgcctccaaaatcttgcaagtccaaagccaggaaaaaaaagcgaggctgcctactcttgtggggcgtggaaagtcacaagcatctacctttgcctgcgtggatgcaaccaatgccaagtaaaaaaaagcaaaggctgggcttttctttttctttttaaatgttacagcgagttttagctcccatttggaattcctatgaatatatcctatttgaaagcatttgaaattctttcaaatttggtgggcgagcaaactagtacgagcagaaaaaaagtcgaaattttctcaagatatatgtcgtgaatgaaataataatactggagtatcatggaggattaaatctgttttaccaaacgacgttttccctcaaaagtttgactagtatacaacataaatacattctgtggcatccactgtattgtactatcttcagctcactacgtttggagaatttacggagtagaatcaaatcttagaaattgcataatactccctccgtttcaaaatgtttgacaccgttgattttttaaacacatgtttaatcgtttgtcttattaaaaaaaattatgaaatatgtaaaactatatgtgtacataaaagtatatttaataatgaatcaaatgatatgaaaagaataaataatcacttaaattttttaataagacaaatggtcaaatacgtactaaaaaaatcaacggtgccaaacattttgaaacggagggagtacatctcaaaaatctctgaataaaatttatccgtagtagtatatccttccatatataaacgtaaattattaaataaaaaggtatattcgtaaaaagttttcggacagacgagagggcaggagtcttctacaagacggctaccgaggagtatgatatttcctctattattattttctttctcatcacgcggctgcgtccgtatcgcgacttttatcctctcctccccaactaactcggcgttcgccatctcgtgtcgacttcctcctcaaaaccctaattccatccaccgctcgatccaatctaccctctctctcgattctcaattctcaattctccctgcaaaattcccaatcctccgtgcagaattagaattatgcgggattgatcccctcccacgggatctccaatatcatatccatccagaaattgaaattcccctcgccgccgatgagccaatcgccgccggactcctcctccgcggcggcggtgcccctggcgccggggtttcgcttccaccccaccgacgaggagctcgtctcctactacctccgccgccgcatcctcggccgccgcctccggatcgacgccatcgccgaggtcgacctctaccgcctcgagccgtgggacctcccctccctctcccgcatccggagccgcgacgcgcagtggtacttcttcgcccgcctcgaccgcaaggtcaccggcgccggggccggcggccgcggcggccccgggaacaggaccaaccgcgccacgccgcgcggctactggaagaccaccgggaaggaccgcgatgtccaccaccgcggcaagctcgtcgggatgaagaagacgctcgtcttccactccggtagggcgcccaagggccagaggaccaactgggtcatgcacgagtaccgcctcctcgacgccgacggcacccaggtacctgtgaaatcatttgatccatctcaaatttcgcaggatctaccgtaccacgagatcacgagattagcggtagcaccaaaaaaattctgttcttttagcttgtctcctgctaggcttgtgtgagcggtaggtgggaactggtcctattctactttcaacactcgttacttgctgctgcttagatatgttatctagtgcgaccctgtcccgggcctagaatggttacaacattctcatgtttgttcacttgatacctatatatggtaggtaaaaacctttccttacaacatcaatgacttgctttgagaaaaaccaatatgagcatgagcttatcttttgtcaataaaagaagaaaaaagtgcgagatgcactggtagaagtgatagagcacgtctggaaatgtatgaagcaagggggcttttaactgggctatttaagcattggaaatcttatcctcactctgaattgaggagtctgaattgcggaggaccaatggtttttaacctgtatagaatattgatgtagcatccttttctgatagctgatgttagtttcctgttgagtgcgcaggatctgcatgtggtgtgtagaatcttccagaaaaatggatctgggccacaaaatggtgcacagtacggtgcgccatacttggaggaagattgggaagaggaggatgatgcaattgagaacatgcctgccagtggcgctttcgctgaaatggctgcagtcacagatactgcagatgagtcgactgaggaagatgggaatttctcccttaaaactaatgatgagcctttacaagtaagtactccctccatcccataatataagggattttgagtttttgcttgcaacgtttgaccactcatcttattcaaaattttttgaaattattaattattttatttgtgacttactttattatctacagtactttaagcacaacttttcgttttttatatttgcaaaaaaatttgaataagacgagtggtcaaacgttgcaagcaaaaactgaaaatcccttatattgtgggacggagggagtagtgcccattttcttttgtattttccaagatgttagttattaaaaactgaaattgtactgtcaatactcaacacctataatgaaaactagaggatgccaggaatccatggaattacctttaactgaaaacattctatgtgactatatcaatgaatacaggataatgatagctgaaacaactaagtagactatgcatttgccatcatggttgaagagttcttttctttaattaaggttttgcatgtttctattccctgttactgttctgacaaaattttaaaatagaataattcttgctggattttatctcttcatatttttttcctcgataatatatttattgctcctcctatcaagtgctctgtgatgtgtaacacaccttcatgtacttcaattaccactacagacccaagaataccagccagagataactcctgtgaaagctcaaggttcaaatgaggagaccaatggcggtggttacagttgtgatgttttttctctggatgagattttgcaggaacctgaaaatgtctgcaaaaatgaagagcagaatgccattgatgacaagttcactatcgcagagttatctggatacccaaggcaagatgatggctatgtaggcgagaatggtcctgtgaattggattgacccttcaaatggtgataatacaaactggcctttgagagcatatagtactcagaaccatgtcaatggaacacttagcgctgatggtttctttgacacggtgaatggtaccaactcatattcaggtccttcagataaccagaacctgtatttgcaagatgatggcttgacttcttctcatcaagtgggcgataacatgccattttatgacgcatcatctaatcacaaatgggtagatggaaaggatgattatttgaatttgaatgacctcctctacccgccagcagaaaatcaacccctgtttgatgctggggatgacctgatggcttacttcgatgccacggaggatgatttcaaatttgatattatgggcacagaagattctaattctcaacttccagacatgtcgaactttgtccaaaaggtatgcttcggtgcacgcatgtcacataactatgctacagttctcttacatctagttagaaggacacttcctgatcactatccttctttgacttctttctggttatcaactgttgtattattttctctgcaggatgataacaacaataagtttacattagatgggatctctaataccgctttgtatggtgcttcttcatctggatcccatggcaatatgtatccagacactgcagtaccaggtatggctttatcactatatgcttattagtaactattttcatctactaaagtttgcccattgctttgggggtacatacaagcatcttttatgaaatgtgaccatacttgcatctaagtctctcttctttaaaaatctcatggaactactttggtccagatatgccgatggatgacactgttgacaaaagtttcggaaagcgccttgccagcatgctgggttcaattccagctccacccgcaatggcttcagagttcccgccgagcacaggaaaatctgttgtcccacttagtgctgtcaacccgagtagctctatccgtgtcactgcaggcattatccaactcggtggtatcacttttactggtagcaccgagcacctgcagaagaatggagatttcaatttgctcctctctttcactgtcgagggcgacgtctcaaccaaatccattggttttgaaccggatacgcagatgagcaccacgccaatggtgttgcgcagcggcatgtatcttttcttcgtatcggcgatgattctcatgttgagctacaaagttgggctgtgtatctacagcaggtaagttatagtagtttttgttgccccaggctgtttattaaattgaaggagtcatacagagtccactcgacgtagagggaactgcctgcgatttggacagtttggttctttacattgttatagttggtataccgttctgacagttgaaagatacatagcaataaactctggaattggagaaactagagttacacgaatttggtgctgaaacttttgttggtggcatgtactgtataatttactctatttatttatttcacccaattctgggaggctgtaagcgttccccgatcgatgtaagctgatctgaaacctgaatacgcgctcttcatttttcatacccaaagggccgagaggcacagtttgcagttactgttgatcaattttcggatggaaggaattttgcgttggtgtgattatgtgcttgtttgtggtgttgtcagaaataaaccatgaccttgtgcgtgcttcatagttcaacgtgttgcgctttggagattggcaattgcatatgggaacagacgcactgcatgacgtacatatatgtaagaaacgcatagcatgatgtacacattggctatattacgtgccaatgttcgtttatcttcatcgaaaaaaaaatattatcacaaaaacgtgaaaaatctttcatacaacattaagaccaaggtggcaattcactgtaatcctatacaactaacagtatactctggaatggaaaatatatttctggcacatatgagtgcactgcgcttttgcttctgatttgttgtgttgtgcccaaacaagagaggctcacaagcacatggcaccgacggtagtacattgccctagacatgtgcggttgtgccttccttccatcaagagaaagacgtcaaattctctcccatctccagttctccatgaccgcctttcgcacatttcagtttcagcaccttcagaactaaagaataaattcgcgtgctttccctgccatcccgcagtgccatatcgtttcaaggaggatgctgctcggcaaaaaattagtacctgctgctgaggcactatgaatgaagttcatgtcataacacaaggcaggagaatcaatccgcggacgaaataatcgcaatggctgctggctggggcactatgaattttctggaaagacggtctggatgaacttgaggaaacgctccgagtagaactgggggtccacggcggagatggagatggagtcgtactgcatggacttgacggcatgctctatcttctttgacatgttgtactcctgcaatatgtctatgatacccaggtaaaggaccacgtcgtacacctcccgaaacgatttgctttcctcttctttagggttctgctctgcccttgcaggcatgttaacccctagctggatctgcagcctgtcaagtgtcaacacaaaaaaagagtaagacacctgattggtaaccctcctactttgggatgaagtgcaacatgaggaaacttttccttgtaatggaatgcttggggtgcaagcaactcagagccatggctgtaaagagggtttcttacaaggaaagaagatattcacctggctgtaccaggaagtagtagatctacttccgcaaatccagcggctgttgatcgtaaacggctacctcttatgtgagggccaacaaccacactgttttcatcaccacctctttgaaccaacactagaccttccgggtagttgaaagcatcgtcctcctgagcgtctgcaattgtcgattataaacatcagctcctcaactgtattaacaaaatatattatgtaccagctggaaaaagtgtccacttaccttcttctgaaagaacagttaatctatctgctgccatgcttcgatgataagatgcacgcgtccgaaggtgctggggagctctatagtgcacaccaagcaataagctgtaatccattatccgttgggtccttagaaattcactgtcagtttcaatctgcctgaagagaataataataattgtcaaccactgttgaaaggttgcgtgattgctctttgtgaaggaaaacatatgcaagaaaatggaaccacagcagcaacactgtacatgtgcgaaaattggtactttttttggtggacaccagatcagtgccaaaaccagataattttatggcaacacattgcagaacttggcatgtacttgacattgttttaaatggaaatgggtcattacatccatgaatcctctatcatacatgtgctatctatttagtgacatccttcaactagttaaattttgtatttagaggatatacaagttgaacaacaatttagaacaaaaagatatgttgatttggcagcaagtataatgcagttacacaacaaaccatatcttagaatgataattgcatgagaaaatatgctcacttaagtaaagcctcacgccaggaaggttcaagataaaatgaatagttaagatccaaatccttcagagttgtgttctcatcaatttcgattttgtcagtagaacggcctaaggatgaacctttcaaatcaaatctccgatgaatcctcaattccgtgcaaaacatgttacccattacaacaaagcgaaactgcaatttgcaagtgttaaggattgtcactgcgcaagaaatgggattggagctaaagaagtgtagataaatccgttaccttttgaccactagaaggcttcaccctgtggaggccaaaaaacttagttatgagggtgttctcataagtacggacatgatggtaatattttggaagcattcgtaaaagaacctgcaaggatcatatagagtcatgaaatgtttttaacttccgcttgctaagtaggtggtgttacttataatgtataatttatcgaagaatctaccattaaagaattttctagcacgcttatatgatctctgaaaatttaagcataaaacagaacctggacttcagatttccgaagagtcttgatcatgaatcgatcatcttgtgataggaaaaagacacttccactctttcctggagaagataactccctaagtgcagaatttccacatatagagatcatataatctgcagcatcaatcttgaacatctccctcaaatttctacaaaaaataaaataagaacaatggccattttaggtgtgtgacagaaagaagagaactataagctagaaataagaataaaaagaaaagaaaaaaggtacatagctacgttcagattaagtgatgataactacgttaggtgagtatgccaattctaaagatcatgtaaatctgcagaataagtgtatgggcatatcttagagatgtacattgggatgaaagctaaataagtgcaatgaacctgaaaaccatgggacaatagtccttccatttgaagtcttctgcaggatgtgaaggagtaagtcgtgatccttctttggggaaggtcatccagaaacttgctcgtggaccaaaatctgaagcacggacttcacgtttctgaatgggcgtaatctttcctaccgtgtacctaaacacaataatgcattgatcattataggatataattattactgatgtatcaccatcatattgtcctactaactaggaaaactctcattttaacttaatagatgatgcaatattttgcacgaaagttcttaagagcaataaaaagtgctgctagaaatactccctgcttaggccaggtgctgtatcttagaatccaaaaaaactactaccagctagcaaataaaaaaccttgcattctaacttttcaaaaggtaaatgttaccgtggacactattacgcagcacaagcattagacaactagagggacctgaaatagttctgttatagttttaggatatgttgtcaagagaactagagaagactatctataaatgaaaacgatcaacagaagagagtaggtcaggacagtattagtgggaccaaagaaattaacgaacagatgtcattcaaatcttgcaactacgatgccgaactcagagggattacctgattccaagctgtagactgagcataagatcatagcttctgtgacccttaattattgtctctcctggcttttttgtctccctaacaattttcttctggcgccgttttgccttcttggacgaatccgaaaaactcctgtcaagtactacctcgctgattagaacaccttgcatatattcccgttccagcataggcagatcagaatcattaatgctttcagatctttctaggccagagcttccagttgcgtcatggccaatgaatttttcaatggccacctcaaggctccaccgtctttccaaggatacatttttcgaatgaggttgctcacttgagttccttctagatgaaggacctgaagattcccgagttaagccaaccttcatgttccccatgtcaaccgaagaagagtgaaggatgcgtgagccgtgattctgccttctaatgtcaggcagcacacctcggtttcttagattattgatgtagagctcatcattaacaggaactctgcaaccttttggatagaatgtgcctttcccatccttcagtcccttggtccaagtaccaacataatacccacactcattccatgtatagattccatacccgtgcatcatgccatctaaccagtttccttcatatgaatccccatttttccaagtaagagttcccttcccagacatcttgccattcttcatattgccaacgtaagtgtttccatttgcccacgtatacttgccatggccttctatttctccctgaatccaagaaccgtcaaacatgtctccattagggtacgtctggcatccaagtccatgcttacgattcaatttccaccttcccttgtagacgatgttgtcagacccggtatatgtgccttcaccataaatgtagccaccagagtactcaccctcgtaggtggctccagatggccacattgtctttccttgcccatgcctcatccctctcctccactcaccatcgtaagtgcaaccatctgaccagacatacctccctgaaccctctggtgtgttccccaataatgtgccgaaataaatatccctgttggagagcctgatctctccaactctgaagccagggtttgttccagaagcatgagaatcttggccatttgctaaactggacagtacctccttttcgatattgcaactagcgtctcggaacagctctactctttgagaacgggagatcccttctaactcatttggaaggactgcaggggctgtcatgcataaacccactaggaggactaacccacagtcgcgaggaagatactcctaagcacggcctgtaaagaaaagttcacgagacacatcagtaatgtaacctgtggaaacgtatccaagtgaggataaactgcgttacaacttatcctattgcaatattcatagaaagaaacccttcacaaagaaattgattgtgcagctttaactagaaaatgagagacagtcaagatcaggtgtacaaaaaaattagatgaaatttatattccttgaaactacaaacctaactaatcggagatgaaaatcgttgtagtacacgtcctgtaatcgtatcatgactattattgtccagatcattctgttgatcgtcacatcgttttgtgaaggcaaaacagtaaggacaatggtaatcaacagcagcactaactagtagtagcagatggtaagaccccacccacggtcgtttcctcaattgtttgctgtaggaatgtaatcaatcgggcatgaaaactttagcaacaaatttgggggccccaaatgacgtgagcggcagttgggctcatacgcacagcaaatggaggagtcatccaatatccatcacagtggcattcggagcttgcagtgagttgataaccaggaaaaaagtagtaggcagcaggacaggaggtgtgtgatccaatcgtgcgtagtcagtaaaaactgaaggttagtcccctcgagacaaatccttgggagtggagagatattgtatctagtaaatcaaaacagaagagggtattgttcgaaattcagaagggaattacggctcggaatgaatctaatcctaacccagcctaaatctaaacatatacacgcagcaaacgatcgtccacacaaaaaatatatagtagaggaacaaaaacgaggaaaaaaaaacgcgtcaacgtgcaactgatttaggagtaggggaaaaacgatggaaacgtgtagagtagagtgagggggatccataagaagcgggggttggattcactcgctttgggtgatgggtatcatcatccgatcaaatcaaccaatggatgaatcatgagaaggcaaattcgatagagcacaacacagacagaagtcagtgagggattcaattcaaactgcagcaggaggaggaggcgtggttggtggtacgtacccagggggagaggaggaggcgattgcgagacgaactcgacgacggcgacgacgaggcggagcagcagcagcgaatcgaatggcgatctggagggaatccctccggtggatgcggttgtgatttggttggttggttggagcggaagcctcgccgtcgccgtcgccgtcgtcctcctccggccggcgtgcgtcgccgacgagaggcccctctccgctgctgcttcgtctcgtgtggtggtgtatgcggcgctagatcttttactactactagtactagtagtggcctgcctgccccctgcccgcgacgccgctcgatcacttgacttattaacaacaacaaaaccaatcaacttatactaacaaacttgagtagtattagtactagtacggagtatattaccttttcttttttatctttcctttttgcgattcctatagtattcttcttttccgttgatgacgatggtcgatacgaactaatttctctctctctctctctgccttttttttttcaaaatgcccttcttttctcttaataacaagtttaatattatacctaactagactttaaatcatctatattcaatttaatagccggttcatacaatataaacatatactacataatttataactggttcaacctgtcatacatacatgtatcttagagtccgtattgcaactagctacaaatctatggcacgttgtttttctctctcctattttatcttctcgaaatatatttatatctagcttataatctgctattgtacttgctacggaaaacaaagtgcgcgattatagtgagattaattaagtattagctaaaaacttaaaaaatggattaatataattttttaaagtaactttcatatataaaacttttataaaaaaatataccgtttagcggtttgaaaaacgtgccgcgaaaaatgaaggaagtgagttgagaaagaggggaaaagaacatagcttgatggttttcactgtctctagtcccgatctaccgtctccgtctaaaatataagaatcgagtactatatgtaatatatattttaaatatgttcagatagtaaatatattttactagaaaatatccgtagtatacttgtggcggttaatcaacgtatctgtctgcacaagttaattacatccttccttttaattctctccattttaattgacaggcactgccatcgcttcagttgaggtcaacgtactcggcacaaatcacaggtcaaacctttaattaattaccctctcttacgtgcaccaatcatgtcctccgcatcattatcgatctattagcacgcaacacaccacagtactcgtagtagtagtgcttcatcattaggttaatttatttactcctgcatcgttagattagatctcgggtgaagtacgttattaagtagtactaattacttatctgcggatcgattagattacagctatctagtgctggtccagtgatccagtctcgattgcgagcaacatgaacgctttaattccacaatccacacttacatccatcttgcatgtaaatatacaaccgcaacttgcacaacagaagcaataaccttaagatctactgtacgtactatacctctgttttcaaatatacttcaaacgtgtgtttacatttacaactttacaactgattattcttttatatggtagagagtgtgcgcgtgttttatacgagcatctgcgtttataatttgttttaaaaaattaacaacatcatatactactttactttttttaagtatatgatgttattgacattttaataaatatttgatcattcatattatttaattttttatacataaataaattttaagtcacactaaaagaatatttgatgatgaattaaatcatgataattaaatgataattatatattttttaataagataaatgctcaaatatatcttgaaaaaatcaacagcgttatatattaaaaaattaaaaaaaacagatagagtatttatttagggggtaacatagaggggatatttacattcgtttgagcaagtgacagtaaagaaacaaaaagaaggaacaaaccaacaaggtcattttcgataggctacgcaggccggccggccggccgaaacaaatgggtcacaattaagcacgaatttaattggggaaacgccatcatgtcattcactggatcgaatctgcaagatttaattaagccgtactccgttccgttccaatccatacaacgatttttttggttgctcggttcggtcggttgttcatgtgtcccaatatctcctctccttttcttcttttttttcccttcttcttttaacgatgcagtagtgtactgcccacatcacaaattataaatgttttgacgtctctgcctcaatatacttgtccattgacaaatttggaagtatgtttagttagttcaacattcccgttccatacctccacttgcagtattttatatacgtcatttcttttctatatatacatgtcatttcatatatagacatctgtactccttattaggaggttatgttggtgacagtgaatctaataccctatttactctatgaacttcataatagaaaacaatcaaatctaaataaatagtcatatataaaatcatatttagatgaatatcccctaaattaaaaatatacataacgcattttatgaacaaaagtatattgctatttattttaggtaatattattacattatattttctttttttgagtaaagtatgggtatttagctagtacgtgaaaaacaaggaaaaaaaactggggttttttaaggcagaagtgagtccgattcatcttgatcatctacatcaatgccgtcttaattaattacctgtaaattaagtgaaggccactatctttccttgattagttaatagtacaattttccagctaagctaagctgtccgaccagttaacgagcatcaggcaggaggatcatcatatcctgctgattaaattaagtttgggacagagaattgctagttagctccgtgtcccttcaaacatcatacattcaaatggaagatgatatatataggagtaatataatatatctatgcatatccagttgcgtcgtacagtgttatgaattgtcctcatatatatcgatcagtcatattcatataactttgtcccttgtttgttttcaatcttctttctcatgtggttgcagtatgaaccaaaattgaaaacgatattattccaaaaaaaaaaatggaaacgatatacataatggcttgtggctgtatacatatatccacgatatagtagctagtactgtggatatgatttagtagaaccgtatagtacacgtgaatcaattaagtacatatatgttgagaaaaaaatgatgatgtggtggtaaagtcaggggtgcatactatgtatgacgtactccaacggaccatcactaacctttaaacaatgatatccatagatattacatatgtatggtttgtgctatcaatagaaatttagtaagctcagatttattattggttgttatttccttagagtatatgttagaatacgtatttgtgaatgtgtgagtgtgccgtgcgtataaatcatctaaccggaaaaaaaaagaaaaaaatcaagtacaggtgttatagcagctgatgacagcaatcaactcatcgtgacattgacatgaatgtgtttatttgctcatctctgattaaccggtcggtcggtcggttatctgccacgtgtttcgcacactgtgcatacgtatgcatgcatattaacatcaatcacagagacaaactacatatcaaattaaacgttcggatgcaaattaagatatttccactaactggctagcttgtgttagctatagctagctagcttatttatcaataaaaacatacagtaccatgtatatattatggtttcattaaacaaaagtaaaccatatttcatatttagggatcaaacttcagtggttgagatatattcgacgaacgtaaacaaatacacaaaaactttcaatcgaatgtatctcgccaaacaagatcaaagaagaatatgtgatgcaagcaaaacatgaacattatgcgcaattcgtatatggacatggcataattaaaaagttacgggtaatggagatgacctgttaaatgtgtatcttttgttgctttgcatcgaccggtcggttcattgatttcaaggtagatcagatgctgatgctctgtgttaataattgtttatgagctataagctagctagtggaagcccatggattgatgaaatacaagctgggaagcaagatgcaaagcagagcacacatttctatttttttttaagtgccaaatttgcaacatgctaaagcagcggttttcgtgatcaagctaatttaaaacgagctagcaaaaatattctgcaatctttggaagttgaaatgtaggatggatggattgattgattctacagaaagtgagaacaactttggccacatatatatgttttcttccactgaaaattcttgcaagctaaggaaagaattaacaatcaaaataacttcatctttttttagcttttgacatgaattaagatcaccaaaaagattccttgttttgttgtagagagtataacataaagaaaatgaatctttgtacagaaagagcgaaagattgatatccacattatattggtcgtatactttgggaaaagaaagaaattaaaggacggtaatgaccgactttttcctcctgaagaaaacagttgagatcatctgactataatatcgttttggatgcatggtatacgtgcatgcaaaacacaaaagtttgtacttacgtagagagctaatttcaaccatggaccattttttttataattaaagaaagtacgctatcagttggaaatgtactttatgagaaagttggatggaagattggaagagagatagacgcgtggttggtggtccgtgccttttgatcgtatgaacgtatgatcatagcatcattttggtcttgatttttgcagcacatgtacacacatgtaacagtattagtacgtgtgtgtagcccacttaattattagtaatcgagactttgtttaatgtgtggatcgagtcgagtgagcacatatattccggcacgcactacagtgtactatagtatagtgtttctggtgtgcattttgtttgatctccttttcaattcgccagctagcttaactggatcacctttgtttttgtctttccttttttttttaacggggtacatggcacgcgtctacgtcttgtatgctgcaaaatgatactctctccgtttcaaaatatttaacactgttaactttttagtacgtatttgaccattcgttttattcaaaaatttaagtaattatttatacttttcatatcatttgattcattgttaaatatactttcatgtacacatatagttttacatattttataattttttttaataagacaaacggtcaaacatatgttaaaaagtcaacggtgtcaaatatttaacggagggagtacaatcatacagctgatagctagatgcatgcgtgctaagcatataggcatctgatccctgatcagaacctgaaaagtgcacgagacgagagccaaactgtacgcatgaatgcacgatcgtgctgtcaccatgcatggatgccaagctatagctagccaagcatatatcatgtgttagagtgagagtgagactactcttttttctgttcatgagtatatgctgttcatgagcactactcttttcttttcaccccaaaaggtgctttatgtttctcctaatttaaattaactttaaccaaatttttagaaagatatcaatacctataacactaaaattagcataaaaaatctaccattgaacatgttttgtaggtacttcatccattcaaaaatataaatatttccatattcattttgaaaaacgtactgaaatgtttatatttttttaatagctaaagtatttgttctatgtaaaagtgctgatttatttctctgtgaacttgattaacctataacaccatcaaaccttacaatatgaaacagagtaactatatttttctttctcaaggaactaccttgtgtactctctgcagtcaactttactgtgccattgtcactgacatgtggactcgacgacatatcaggtccatatgtcattgacaaaggcatagtacattaaccgcagagcagaggatcctgatccgtgtactactactgttctgttcttccctatccctagaggcagctggctgagaggactcaatcaattaactggtgatcgatttgatttgatctgatttaatgtgcatcgtcgttgcccctgttctgttttcttaatcaagcagcagtaattttccaactcattcgattccaatagattagatatagataggtagcctgttgctgtatgaactatcggcgtcacccaccatggagatcgaattaaggtcatggatgcatgaatgcggccctacgtccgtctaaaacatgacacaaaccaaaagacaaaaaaatattgtgtgggtttggtttatcggacggcgccgctcttactctggagtacttaccttagcttgcgcctgcagattctataattatctattgaccgtttcgtctaacactgatctcatcctcctaatccttgcactcacctacttatacttgatttaattatttaagtctaatcaaaatatctctctgatattgagctctttttttttctccctttgagctgtctatatatgtgatctaatcgaatcagccggactgatcctcaactacacgcttcatcatccaacgctccagtgctccaccatctgcattccaatttccaaaccacttccctaactttttccaccctcacccacaaacaaatctaacccaaatagtttatgtactaacaggatgactaattagctcagctttgcccgcggcacacacttttggcatataaagtccgtgtcaaagtttcagatgaaaagtttctggatggaagtttccaaacgaaggttttttcagatgaaagttttcattaaaaaatgtgttgaaatccctatgtttgggcctaataatacagcgaccaagcggcccaacctacgaccaccagactgcctacgtgccattttggcccacccaacccaaatattgtagtagctctatcaaactatatgactataaagaacgtgcacctttaaacaagattacaagacaagtatcagttgctctagactctgaaccctttgttgtttacatcatgcccatttaaccccataacattaacacaaataaatttgtcaaaaaaaaaaaggtgcaagaaactgactttacaggtaggatggacagtggcaatgtgtaaagaccaagccccgtgatgtgacactgcaccttggagtttcagcaaaaatctctgcaagtaaatcattgcatgaattcagctgctaacacaattgacgaaatgtatatgacagcttaagaacggagcaaaaggtaaggaacaatggaatgccttgcagatgagcttacctggtgaaatcagaattcatccaaagcccaccatccactaaagattcaatcaagcagcttcagggcttatttcgcatatacggtcagccttacttgagctgtgacttcagggtgaagcttaatctctgcaatgtattccccaatttcacgaatttctggcactgtcacgagacgcttgtcgacatccctacatgaaatagtttccggtaagcaaagcaacagcagcaaatagagcatcgcaatccttccttaaaaggtagtgattgtcagtgcacttagaagggcatacctattaagttgtgactttatgatgtcaacaagatcttgtgctgtgacgctgtagaatagaagaaaaacttgttattaagtgcaagtaaaataagacgatacataaagaactatctactcgataaaaacttgcctcccaaatatctgttttcctttcccacctttacgtggcactttgaatgccccaatagtttcaaaaacacgggcaagttgctgtgcctcttcttttacctactcaagcacaaatgctcaacagggtaagattatgctaacactggatgaaagttcttatactcttatggaaaatgatattggtaggaacaaatcatgctttagactttttacaaaataagctaaaccacaactacgtaccctggagaacaaggattagtagggtataactaccacagtagtttttagacagacaggaacaaataggaataagtttcaactatatcaattcttactgagtccacaaatagaataataggtttacttacccgcttcttttcagcatctatcctctcctgttctacttgcatttccctgtagacagcagcagaggaaattaagtagcttactagccatccttttacaagaactaattgaacatgttgaacaccccagaagaactgaactagaaatgcagaataggcatctataaaagtttgcagatttatatgtcaatcctgggctccacaaggaggcaagagatacaatggctaacacaacagaataaatagctgcaaatttacacctgcagcatactgtgaaaaccaactacgatgaaacataagcatacgtcaattaatttactaggagcacctatctgttggttgaaacatagcctatacaattcgtgagatgtggtaaatgactgtaagacagaagattacttgagtacttctggggtgagcagcgttgccttgccctttggcagaaggaagttgcggtagaacccggccctcactttaagcgtgtcccctttcttccccacctctgctatgtcatctgtcagtatgacctgggagaaaaagaaactcaagtgaagtaaatcaaatacggaatcgtgcattacatgctaaagtatagaaatgcataatagacaaggaagatgatgacataggcttggaacattttacagtttacaggtgcaaattttgaactgggtgtatctagatgccttttagttgcaactttccctacaaacaaacagcatggccaaaccaacaattccggcgttccggggcatatacagaatcatattagagatgacttttgcatctgagttgcaatgctaagaggcacctaattaaaaacatgacgatagtttcttccatttccatgtactgcatcagagcatgcgtccatggcaatgtatcttttcctatactcagatgtgtgaatgcacacagtaatcttaagcttacagctgctgcatttcgaatttttcgatcgatggaatgcagtcgcatgcgctttgtaatctactgtactgattagtggacagggtggtgacagacagtacattgggtatggctagttctaaaagaggcaaaacaaaagcatcaccagcaacagcttgttcaatcagtcagtactagtactgcttagctcgaacgaatcgcaattaaatacatacatacatacatgctgcaactgtggagagaaaatacaagtggaagccaaacctggcgatacttcttgaccttgccctgggcgacgacgaccagcgacggggagcggcgcggcgggaggcgggaggagggggcggaggaggaggcggcggagctccaggcgagcgtggaggccatggcgttggggatggattgcgggggaagggaaggaactgcggctgctgctctcttatccacttccccaacggatttggtgccctctctcttgggctttgcgctgctttgggcctttcaaatcggcccagtatcaaaggttttcttcggggttgtcatgggcttgaagattaagggtcattttggtttggcgctccttcttgccttactaattctttgataacttaaaggtcaaaaataaattatttggtaactttgaatagttaacacgtaactatttgaattagagtcaaattttgctaaatcaataaggtgaagccaaatagacaataacaaaaatttagtaataccaaaatttactcaagatttggcattgccaatattttggcatggtttcataccaaacaagtcgtaataataatccaccaaattgtaacccccttccactcaacgtatagagaaaggtaggagatatatatgtacgtgatacctcgacgatattactaagatagatagatagtacatgtgatgccaagatgttataacatacattaagagaaacactcaggggtcttccggctagctccacaaggtgatagcctaaatgacctggattcgtaacctcaccccttctaattatttgatattaggtccttcactaatattcatgttataacataaatcgagaaatatattattataacactattttggtgctatcttgaaactcaacgatacatcactagctaccattacgtataaacgtgtattaatagtataagcaaatatcaacgagtatcatcaagtatcaatgtgcaagaacgagtattagcaaatactccgtatcttcatgaataatatcaaagagtataatcaagtatcattgtttaattatcaacgagtatcatcaaaatatcatcctcgtatatcatactccagtatcatcttgttgtactttttctgacaaagatctccagctggtgacctgtttctcgaaaggaacaaaaattaaaaaaaaacctagcaaatcgttcttaaaaagaatggcgattatatatcttattgaattagtatgtctactgctcaacgagatgagaaaaccgaagagaagaggggtatataatcgagtatatgtcatcgtcgtcgtcatgtcatgcagccgtccatgacttcgtccttcccgccatcggagaaaccaaacaagcggactccacgaagctagctaagctagctagcgcgccaaaactttaaaaatcctcacaccctcttccaccttcgcttcatctccaatccaattctccatcgatcgttacacccaaagatcgagataccaataccatggaggaaatcttggaatccgagtactcggccgccgccgccgccggcgacgcggcgtccttcgtgctctcccgcttgccccaccccgacaccacggcctccgccgctgccgccttcgtcgtcgacgtcgccggcgccggcggcggacgaacgacgacgctctcgttcgtcgccctccgccgtgccgcgctctccctcgcctcggggctccggttcgggctcggcctccgccgtggcgacgccgttctggtgctctcgcccaactcgctcctgctcccgcccatagttcttggcgttctggccgccggtggcgtggtggtcgccgccgacccgggctccacggctgaggaggtggccaccgtggcgcgcagctcgggcgcggtggtcgtcgtcgcggcgccggaggtggccgagaaggtcgccggagcaggcgtgccgctgctgctcacgtcacgatcaatggatccccgtgcgctctccgcggaggagctcatggacgacggtgacccgacggcgttggcttctcctgaggcgtcggcggcggcggcgaggccacgaccatcggatgtagctttcgtgttctactcctcggcgaccaccaagacggcggcgaccatgacgcacgccgacctcatcgccgccgtctccggcgcaagcttgccggaggagggccgtgtttgcttggcgtctctccccatctgcagcgtccacggcttgccgctgctcgccctcgcgctcccagccgccggagtgaccacggtgctgctcgccgcctcgccgtcttccgatccaacggcggccatggaggcggcggccgcgcacggcgccaccgacgtcgtggcgacgcctgacgtcgcggcggcgctcgcggctcccctgacgatgctctcctcgctgaggagggtgacggtggtgcctgctctcgcgacgacggaggcgcggcaggcgttccggcggtggctgccgtgggtcgagctgacggagatgtccggctcgccggagaagatgatggcgtcagcttcggagcaagtgcaggtggcgcctgacgctgcaagcgccgcggtgatagcacagtaagtgcgcccttactgaagattctatgtatcagtcaatatttgacacttacgaaaaaatggcacatttcaccttctttacatgtcaaaattcttgcaggcaaaacagcggaaaggcccattcaatatcagtgacaagtgaaccaacttcttcggtaaaattctcgactcaacatcactagaaaaatcatgcatgaaaacatatgtactagaacaaacattggcaaggaacgatgtccttctcggggtttatgaatgagatacacacagaattgagacatgcatatagtgacaactgaaccaaatttatatctgaatagtatatttgcaagtttgaggtatataaacaatgtattcatcccctcgccgaaaccaatgaacactttctacttctgtaacaccgactacagaaaagtatgccatgacgaacacaaaattaataactaatcaattatttctagaatgtgatacaaatgattcggtatatttgtatgatgttatgctcttactattgaatgtctaacttgcctatggaaaatttctaccaggtgccactacttaagaagattcagaagactgtcttgggagatattatctcaaaatcaaccgcgaacaagatcttgagggagcacccagaaattatctcaaaactgtagcagctctgcatgcgtctctctgcttggtagctgcttgtcttggtgttggtggacctgacaaccatgctcaaagggttacaagcactgcaaaagttgtactgtgaaatatagcgaattgaatgagtggcaacagattacgaaattatagtctgaatcaaattgtatggaaacgggcataatgcatgataggagaaaaatgcagtatttatgctagcacttgatttctgtaccttcagcctccaggacttaagtgacaactctgtgtgtgaatttgtatttggagtacagaagaaatgcaggtctaaattcaaataacctctgtgggtacgtgactacatgtatttggtatcacagcattttagcaaatatctttgtctcgaacacgcaggagatctacattttagcaaatacgacttgcatatgattatatatatgatatgacattttgaccaagaaaaggttctaccccagatgatctgttattgggttcatttcacaaataccaacttttttatcggccgactcacacaaccactacataggaagaaatactataaaacaataactcttgaaatgttcgtgttgccgatcgttatatattaccattttatatcaatgttacaatagcaataccaaaatgagttaaaattggcagctcacaaatctcatcattcttaaaataaagttccagtagtaaagtggtgcaaaacaaaagcgctttgacaattacttaaagcacaagtacaccagaagttccactccaggatgttgcaagtagcacttactattcatcatcagagatctctgcacttcctgccacccacttccaaacacccccagatttctgtctttgagcagttgtcatggtttgctccacctgagatatttgttgccgcaacacttctagttcattctccaaagaatcagtagattccagtcttttatgagcagcagcaatttgggactgaattaacgagaataaggaaataggttagcgttcagaagcatgtaaaaggatcaaacaaaagaagatggcatgctcatgcttagaattcattgtagtgcattaagacagaacctccagtttctggcacctagaaccctctgctgctaactgatgttgaactgatttaagctccttcataagaaagaaaaatagtgaggatttattagagatgaattgagaattccattttacaaaatggaaaataaacatgtacctttgtcaattcaccatgcgataactttaccatatctagtctatcctttagttttgagttttcatcacgaacttctgccagtctggactctagcttgcctttctctccattaagtgcatcaagttcagtagtaatttgtttggaagaacctgaaggctgaactctcttcacatctaaatcatccgttgcaacaatgtctctggttttctcatcagttattacagcataggcagctgtcacagaagcagctgcggcggcagcagctggtgattggagcagacgaggttgcactaaattccttggcttaagtttcataacaaatatctgcagcagtgtccacttgtgaagaaattgcaaatggaaaaatgtgcaccaaaaaggaagggaagatgaaaagagaaaaaagatgcaaattcatcctgagtgtgtcaagcattgaaggcacaagacatgtgacacctaaaagtaaaaaatctacagatggatcatttcaaagctgaattgaagtactatgcatagaactaagtcactcttttaaattcaatacctcattattgtattgtccattgtaaccaccaaaggcaaccagaaacttttcgccatcaactgtggttgagcaaagagtgagaccctgaaaagttttttttttaaaaaaaagaaatataatattaaagaaaagttgtcagcaaagcaaaatccattatgttcttaaaacagtagaaagagaagcatccacatttgctgtcagggacttgaaattactgctgaagtttgaggaaaaagaaaattatctataccataaattgtggtgggtacagattatgatgatgtagattgatcagaaatatataggagttgttaaagctgtataagaaatacgatttcattttcagcaatcgccacagaactgtgcaggaaattcggctagtttactattaacatgatttgttttacgtaagtatagaggaaggaacttcctattcaaatgtgtttgttctcacagttgtgcgatagaaatttatatgagcaaaatttatcacagaactaggtagcacaattgtttacctcacaagcaagcggatctcgggctggcacactggtgactacagaccaaacgaacttggaagcattcatcataattgtatcagtagaacctgcatcgttgtattttctagctacttcagcagcacaggtggtgcaaataaaatgaaaatatgagcatcatgtgttcaggaattaccacttgcgttatctccgccaccaactatgtaccaattttcatcaatcatggtaccagcatgaccactcctaggatttatgtgcgcgccttgagtgtcaggttgagaccactccatctgtaagcattaagcttcacttaatcaagaatgaatagaaaacaatgttcataggagtattagtcaaatcataacttgggttgatataaggggaggaaataaaattctccttcattcagaagcacaacatgatttgttttatgtacctattgccagcttatgatatacggtagttgctgttaagttttcgccataacagactgaagttggatcttagtcattgcatacaaccacccagaaattcaaccttagtttccattaactggatacagtttgaaacttgaaaggcctactagaacctagaactaccagtgcggggggtttggagatcttcaataggcaatcaatgaataaatatcaagacaactgagtaactttttgcctttgaaacttatggtatgtgactcaatgcacaaatccatctgtatggcaagatacatggagagtatataacacttacagtttgcaagtcaagaaggtagatatcactaaagcatgtagagtgagaggaaccgccaaagatcaaaagatactgatcagcataaacagcagctgaatgatcatacctaggagctggaccacctttcctatttcacacaaagataataatgaattatgcaataacaatacgtaaatggaaccttgcacaatcaataaataaattcttaccctgttttaacttcttcccacatcattgtctccaggtcaagtatatgaaggtcgttcagaagtcgcctcttgttatcctctccaccaaacattatcagtcgagaaccaaccagggatacagattgaccaccacgagatatctggttgagaaaagcagagaagttcagtattcagaaaattctgcagaaaatatatgccagcacattcagttctatcacttcaaaagaattactttttgtttcaaatacaaaaggaaatgattcttactggaacttttccatatgtatcaacagaagaccagctatttgtttccacattaataagccaaactgcatgcagatagtcagcactatcatttaagataaataccggtcttgaaattttaatagaacataattaaaaaactgcaaggatgatattacatgttagcaagtactatagactgtttggggcaccttgaaagtgaagctaattatgaagcatatatgattaaatagaaagttcagtacactgtgtacaagtgcataacataaggaaatgtaaaaatcatcacttaaaacaatatcaaagttaatccgaacagcctttaaacacatgaaactacatcgagtaattatcttagtcagcatttcatttgcatctcatttttttgccaggacatatgaaatgacatggagcaaggaatagtcggtaccattttacaggtagaggcaaagaaaaccaggaaagggttctgaactaacgtacagattgcttcagttcccctattggagattatctatcttaagcgataaataggtccatataaagatgtaatgtacatatagccgcttcaaatattgcatctatacaatatgtaaggtcataaaggatcatggtaattggtggtgtggcaaagcaataaagtcataagtggattatttagcaatatatatgtctaagaagatctatgataggaagattctgtgctctatgtttcagtgtgacgatatctatcaaataattgtagagcttttgaatgagtacctgaaaccttgtttgatgttgatgttctggtgttcccagctacaaccacaatatattttttccagttgacctaagtggtgacactatgttagcataggaaacataccaatgttggattgtatgataaaaatattgctaagttgccatacaagtgaaagagaaaagatagtaagtttaccagactgtggcctgctagtgcagggaatgaagggtctgtggtattattttcgatattcaactgacttgaatctctagcagcacttaatgctgaccacttgagtgtcctaaaatcaaagacctgtgaagttttcccttgttatgatatagaaggagaaatggcatgagaaacatgatttgttagagtgcattagtgcagactgaaaaacctggatatctgatagatagcggccattacgactcccaccaaccacatagagtttttcacgaaccacttccgcagcatgctgtcatgtattagcacttcaataaaatatgatagacaacatatggaataaccaaagaacatcacgctattcaagttatcttttcttttcggcgaactcgcaaaagccttgcgcatcgatatgttagcaggaaaagagagattttacaactgcgacctgctgagtgctgacgcagatcatgggggtttacaggggagagggagggcacgctagattaactagggtagaaaccatactcctgagaacaacaaggagaggagaaaaggagaaagagtagtgactaagcaccaagaagatctcctaggggactaggcaacgctgcaacccaaagattttcaagttatccttatcatatactatcttaaggtttaatgggtttcacagtctaacaaatggagcacactacaacaacggtttcagtatgccgccttgcataaactctttggctttaatcagataaccatgaaaacaggacagtagggaaattaccaaaatgtggccacacccgcgtatctgaaaccaaaattctctcaagactacttctgtcggccatttcagtcctaatgccaatccctcggcattgtcccactatacgcagagatggcatctccaaagccacaggattaggcacgcggtttgtcacattttcgcattcgtttgttcttaacgtgcgttccctgagaattgatacgacagcatctactactcgcattcgtttgttcttaacgtgcgttccctgagaattgatacgacaacatctactactccaactgatcaatacggacaaaattacgaaaactactgctacaacaataaaaattaaaaatcagacgacaaggccgtgagtaatcggaggtagaaatggaattgggcgcaccttgtaacgcgcggatgggcgcggggatcccccggcggggctgaatgggagccactggtcgtacggcgccgccgcgaggtcgccggcgtcgccgttgatcccctcccccatttccgcctcgaatctgcaggggatcgatgtggattggaggacggggatgggccggggtttggggatctgcgcggtggaagcttcctccgcggattggatggattcctcccagaattttgactcggaaaattggatctgaggccgcggctcggatttccaagcgagcgcggatcactggagtggactcctcgttggtttctgcgtgtcacgttcgctatgaaatacgcctccctgttatgaaatcgtaaatggagcgcgaaggcgtatacactggaatgtgttctcacgtacagaaaacgtattctcgtgaatacgcgttggcttacgattgacgtaaatggtggcctgtacatcttttgaaggtgaatgcgctgatgagacgttggcattcaacatgtactttggtccaagtactataggtgcggaaggaaagtgtagattaattattgaattgtctattgttgtgcatattattggatttttttactgtaaactgtatttcttttattaacgtattccctacgtactcgtaaaggaagtcgttttggacagcgacacggtctccaaaacacaactttaacttcttctttctataaaaatatttattaaaaaataatatatgcatactcatatgaaagtatttttcaagacaaatctattcatataatttttacattttcaaactcaacaacttgagagttattcatgatttatatttctaaggtttgacttaaacattgtcctaaacgagtacggaggaagtacaaatttactcaaatgtgcgtgcgtacgtagttagtattacctccgttcagaaacaaatgtcggtttttactttgaattaccaatctctcaccaactgtatttttataaaataatctgattatagtatcaaaattgtatcattagtttgtaatcataaccactttactaatagttaaagtttactactgcttgatcagatcaaaactaacaaagatcaaagaagtacaaaagtgatacggagtgctatataaaatgcgcaaacaaacttatcgtgtgccttatgcgacaactcggagacgtaatgcgatcgatacaccttccctaggaatgagctgaggttgacaaggcatcctcactctctcttctctataatatttttaaaatcctgattaggtgtccagttagaatcattaacctaatactacgaaagagctgaaagtagtgtgaatcttagaattctgggccttttggaattgtgtttagctagccatatctcgaatcatagaaagcgactgaactatttagctaacaccgacaggcagacaactgaagaatggtgtccagatagctaccagaacaatagcatttttttttgtcataaccagatgagtttggttaagctaacggattaatttttggtacggttgatacgcatgcagtgatgtagatgatgcgtgtgctctgagaattcttgatacatcagcaaaagttctcccgctgttaaatggaatagtagtatttgttggtgtgtatatgttcaggttcttgtttctgaataaggtaaacaatgacatgtttttgtcatgaaatcagaaaagatagtactgctgattgaaccccacgcgtgtagcgtgcttattttccaacgaggaacaaattgagaaatgttggagataaaaggttagaacagttaggggttggtaagtttgcttttttcccaactacctcttgttccatcttccatacatgatgcatgcttcaccgccaatatgtcaatcttctgatagcagctcgcattttcatttataacaaacttgtttaactatgaaaaaattaagtagctaagaatgtaagcacagattcataaccttattcagttctgttgtctgatctgaaaattcagactacaaaatgaccagaaaaaccaaagatcagcattatattcggatcgcataaatgctgagaattaaggtagataaaccaaaacataacatatactatagattgctcatccttccccaccatgtgtcattaagaggactcatcatcactgacatcagatgaacttgttggtcaagtctcccccagatgattatttatctccgatgttcgtggccctgataaccaattaagttttaacctacaggtatgttttcttaatgctggtgctactaattaaccatctttgagcatttaagggtgccattaatttgaaaaatacaactaggtaagctagcttggtggtgtattaagacatgttcatatgctattatactataaacatcattaatgggtatgtagacagctctgtttaagaaacattacggtagtgggctttattttgcagggtcaaggcatatccatctatgttcatgggatattcctagtatagaagcatccattttagtcaacggtgtgtataaatacggcatgtctcccgtacgtgattcatgttggcgacctcttctcgctcgcaactaattaatcaattatccgcggttttaaattaatttgcgtcctagtacttactactcagagattcagagtctagcttgttaataactgaacaacctagttgatgcgtttggtaactaactagctagcagggttaggaggaacatggcatgcaatgaatcgatcgagagccgcatcatcctcaccgaccaatccaatttaaggttgggttcgtataggcagcgaaaggcatatgcaggttgcagggctggaaatcagagcgaagtttcagaattcaagtgcacatgcaaagagggacattaattcagaaattagaattaaacaggaagatgtcttgaccatctactacgtgtactagctggagtagcattgaatccatggagaaggagagatcagagagaggttttggtgtagtatttggtcccatgcatgcatgaacgacaattgaagtacactgacagtttgtgaccgggagtcacacaaggcggctacacatgcacgtacagtagtgatcgtgattgatggaggaactcgacaactagctagtctgaaactgcaagtgtgcagctgggtgccacggcgagcacgtcgttgtggatggccacacgggatcccatgaaagaaaaggtacggggaatatccgactccatgggcccacctgtcagcctctcctatcccctcctgccatttgccacggcctcctcctcccttttgaagatcatccctccttccttttccactgccattggattggaggcaaagagattcagcttagtaatagtaccgcttaaatctgcatgcgtctgtatatcagcaggctctccatggccatggtcgattcctcctagcttccttcattcctcaacgctgctgctgctgctgcatgcgtgcgtcgccgtcttgtcctttttaattccagagtagttagttagcagctaatcttggctttagtactccgtattagttagcctagctttggatgagcagaagggcagcgtgatcctgtgcacaaccaagaaccaaccccaacacatggaagctgcggcaggggcaggaggagccattggaggtagtggtcgcgaggcggcggcggaggaggaggacggcggcgagcagtggctagaggaggaggcggaggcggaggcggtgtactgcgccgtggggaaggaggcggtgaaggaatggaaggcgaacctcatgtgggtgctcgccgccttcccctggaggaggaggaggagccgcatcgtcctcatccacgtccaccgcccgccttcccgggtcaatatgagtatgctccatcgctagctatttcattccaaatactattccagtttatttccaattaactcccgttcttcattgcgtgcgttcttcttgttgcagttcgctaattcttgcggtcttcttgttgtttgcagaggttttggttgtttatgcttcttattgttttttttttctgtttaattttacgggttctcaattgcccccatgcatctgttcttgcttgtaattaatccggttcagaaatggctttttttttctgtttcttggcatttgattgcactccttcgaaatggcaccattgcaatctcagtattccaaccattgcaaactttttatatatataaaattcatctcccgttatcggcaaatacctgatcttttcaaatccgctcttgcaaataacagaaaataattcaaaccaccttccctaaatgcgacaaatctaatttttctagaaagatcattccatttctttttggcaaataacaacccatttcaagctagctgctgtctcctccatggaaactggggttttttgatgctgcggctgttctacgtgcactgcttacattccttttattttcccatttgaggcctcaatttgttttctgacttgtcgtggacgtgcattatcaaggaaaaaaaatgcgtagaaatcaacatctcggacaacttaaactattgctcagaataatcttatacaaatacatctctgccaagtggaacagtactatagtttctgctaagcatatccgtcttcagctaaaagcatattcactgtttgtattttcagtctaattaagaattgcaatgctagctctgaccttaatcaggttgtaaaacatttccccttttatctggctattattttgatgaaatcaaaatgttagacttggctaccaatattttcttgtaaaatgacaccagctggctgtttatgttctctttgcttttcccaccaaatctgtcaacctgaaagtaggtgccttttgttatgttcctacctttacaataccttttacattacacttttgtgttccaaaaaatgttggatcttttgtgacatttttttttgggtactacctgtggatttgcagtgggggcatgggtcccagtaagtcagcttgcagaggaggaggtgaatgcatacaggcagctggaggaggagaggatcagcaaagtcttagatgatctcttggacatttgcaaaagtcaaaaggttgaaaccatgataaagagttcattgttttacatttgatccatcttgcttgctgtcaatatcagattgctagtctcaactcaccagcagcctctggctgtgttcttattatgacagtctccctcttctccatatgcagcctgggttgctaacaaagttgctgaaaaaaactcgcaggtcaatgcgagcaagatcatcttctcctgcgacgacatcgcgagaggcctcctccagctcgtcgatgatcatgggatcactgatcttgtcatgggagcagcatctgacaaggcctattcaaggtatggctgtcttgttcttggaaattaatacatacaaatccagctctcgctgtcgctgctgttgttatcaatcgatcggtccaagaactggctggtccagcttggtgccagtggattgctgaattcaaaggcaaatgatctggaattctggatgcaatgtgatgttaggaaaatgcgggcgccgagatctaagaaagctcggaaggtgcaactgaaggcgagcccctcttgcaagatctggtttgtctgcaaaggaaaccttatctgcactaggtatgcatgcatgactcaaaaaagtcttaatgccaacgatgcaacttgcaaaagcctttggtttttcttctccctgtcttgctcaaaatgggacaggtatttgtagatttctatgatagcactgatgacaaagactgaagactgaattgaagtagcacaccgtttaactcgtggttattcttctatcattgtaaggaacatgatagaaactttttttttctcgagataaacatgatagaaactgtggttgcgtcggcaacatttcccgacatagttgtctgggaatttaccgttcttctatgaccattttagctgttctcacattaagacaatgatcacagactgaattaggccagacatcctgctcaaaaaagaattaggccagacaaagaataatctgatatactgataatatgataatgtttatgacaaatgactaacaaaataacaaaccttgaacaaaaatagtacctgtggaagcactgagattgcctgaacatcctagtttgtgacatattattctgaacttttggcattcttctattagctttctagctgttctaacataaggatattctatttttcctggaaaaatattataagatttacatatttcctttaattccatttgtctgatccgttatagggaggtgaacgaaggactcaatagaacaggatcatcgacaactagcacaactccgaggtcgagcacttctgattactcgaggtcgagatcctcgccacgagtgcacagcctaagcagcgagcaattcggtatgcaggatccagccgaaccgacgacatcatcagttgatcagactcctatcagggaggacaatgccatggaccgtggcactgagggttttaatcatgaagcagttgctgttgctagttcatcaacagtcccagtgtctgaaaatgtagaggctgtacagagatcagctgctgctgttgtgcagtctctgcaagaaattgaagaggactcaccaactccttcagggcatggttcggtatgtgctatacgtttcataaatcatacagtataatactagtttcaagggaaaaaaagttgaaagaatttttaaagaaaaaatgaacaaatcccaacatgtagaaaaaaactatctgaattccacattacatgacatctgtttacttgttcagttacatcaagtgctagacatctgtttattttcctactcctagattgtttgatcttggactgctgaaaatggtactaaaattgtcgaaatgacttgtttttgtctccactacagaaacataatttgaacagcacatgtttcataagtcgaagattttggccaactgatctgcaccagaatatacagcatcagtgtaatacacattatatgtgtttcagatagtaaacatttaaacaataaacggtgcattccgttttgacaggaggatgctggtgatgtgagcgatgcgtacgacaagttcaaggatgctgtgatagaagccgagaacctcaggcatgaggcatacgaggagactcgccggcgtcaaaaggtcgagcgcgacctcgccgacgcgacaagaattgtaagtagaggaaatgaatccaagctgcattgcatcgttggttcgatcccattgttcatgtcgaattcaccatggatgcttcccgctgattgaagttgcgtttactcgtcgtagtagtctcttcctttttcttctttagtttttcttgttttgtcttttctctcttctcttggcataagccggtctggcggattacgttgtataaacaaacattcttttcttctgatatattgacgtgcaattcttttacgtgttcgtgaaaaaattcaccatggatggatgatgtgatcgatgcaggcgaacgaagcggagagctcgcagcagagggaggcgaggcatcggaaggaggtggaggagaggctggcgagggagcgcgcggccatggagcaggacaggcgagagctcgacgacatactcgagcagacacgcgaggtggacgcccgcgccgccgagctcgagctccagatcacgagctccgagcggatgatgagagacctcgaggccaagctgtcggaatcgtacgacctcctccaccagctccggcgagagcgccggcgcgacgatgtgccggcggaagcaatggcgggaagcgaggctggtgaccagagactgaccttcttgcggctcggcttgccggagctggaggaggcgaccaaccatttcgacgaatctgtcaggatcggaggcggcgacggcagccgtggcagcgtgtacaggggcgacctgcgcagcatggcggtcgccgtcaagatgatcggccgtgacgtcgccgtcgacgaggtcggtttctgccgcgaggtggaagccgtcggcagggcgaggcacccgaacctcgtcacgctcgtgggcgcgtgcccggaggcccgcgccgtggtgcacgagttcgtgccgggcgggagcttggaggaccgcctcgccggcgccgcgccggcgctgccgtggcacgagctgtgcggcgtggcgcaccgggcatgctccgcgctggcgttcctccactcgacgcagccacgggcgacggtgcacggcgacgtccggccggcgaacatcctcctgggcgaggagtgctgctcgagcaagcttgccggcctcggcatgtgcaggctggtgcggagctccggcggcgtggcgctgtcaaggccggcggtgggctacgtggacccgcggcacctggcgacgggggagatgaccccggaacgcgacgtgtacgcgctgggcgtggtcctcctccggctcgtcaccgggaagccgccgttgatggcgaagcaggaggcgcgggaggccgcgggcggcagcaaggcgtggcacgaggtgttcgacgcgagctctggaggctggccgttggaggtcgccagggaggtggcgctcgtcgggctgaaatgctgcgacgtggaggaggagccagcgggagctcgccgtcccggcgaacttctggaggaggcatgcggcgtgctggaggcggcgatgagcgcggcgccggggaggtcgtggtcgtcggtgtcgtcgtcgtcggacggcggtgagggcggggcgccgtcctacttcgtgtgcccgatcttgaaggaggtgatgcgggacccgcagatcgccggagacgggttctcgtacgaggcggaggcgatcagggagtggctgcgcagcgggcgcgacacgtcgccgatgacgaacctgaagctgccccgccgcgagctcgtccccaaccatcccctccgcgacgccatccaccactggcgcctccgccgcgccatgcgaaccaactttactactggattagatagctactactactaggcccttagcacttgtaaggcccacgtttttagtgggtttttttaaacttttttacagtccacggcccgtatttccgattgtaacccccggcattttccatttcgatccatattttggaccgttctcccccagtaggcgtaatggtccaacatttttgcatccaagtccctaattaattaattatttcagtgaaaaattcagaaagaaaaatatcagaggaatctgaacaaactagataaatctacaatcccccctcccatctatgactctccaaaaatttagcgggacctttgtagaggctctcaagttctttacgctagtagtggcggctcaaaaccccgcacgccctcatgatggatccaccttaatcagatcgttgctcatggctagcgacctactccctccttgactctgttatactagaatatgtcagctcttgttttttagatagagtagaactttgcaatccggtccctaatttttgtaaatattttgataaaaaagagtgaattacgctttgggccacattttattacctatatttcactttggaccacccttaaacatatcttttcactttggaccggataaatttgccattgttgcgatttggaccaccacgaatgattttttttctcatgcaatcaacgaccttaaacacatcagctctagtatacggccgatctcctctatatatggttcatatgtttgccgaaagggaaattaaacatgacgagaaaagttgtcatggtagtccaaaccgcaacaatggtaaatttacccggtccaaattgaaaaaataggtttaagggtggtccaaattaaaatttgggtaataaaaggtggaccaaatggcaatttactcaaaaagagtgaaaaaaaagattacttcgccgtcaacctggcccatgaacattttcatagcaggcctaggcccaggtaaagcccctacctcccgaagagagagagagaatggggataagtccatcgggtacgagcacgatactcctcccgctgatcgcgaccagtccacgttgcccatcttctcgtgtactactctggctggctcactggcaggtggacccgcccacctcccccccgagtccattccaacttcctccgcgtcacaactcacaacagaagcggagaagaagaggaggaagaagtccatctccatccccatccccatccccatccatccctcgcggcggagagcagcgtggaggaggagaggtccggtggccatgggcaccagctcgccggagatggcggccgcgctcttgctggtcatggcggctctggccggggtcgcggccggcggcgacatcgtccaccaggacgacgaggcgcccaagatccccggctgctccaacgacttcgtcctcgtacgccccttcccagactttctaccatctcgcttgcgcggtttcttcgcttgcccttagtacgatgcgacccgaattttcggttccgagctgcacgggacgggagtgttcggttcaatttcagtcgtaggtgaagctagggtttcgagctattgatttgtgactttacagtatcagatcagggggacggtatagagcctgtccgattttgtcaattgtagacttcaccgatgttgtttgctgctcagaacaggtgattgataacttggggacacggactcgcggctttgcttagagtctcgactaaattagcctgcccgatttggtttgaattctgaagctcatcagtcaatcgttggagcgggctatagcctacaattaacgatctgctttggaggcttcggttgtaagctgaggacctgtcgttagttactagtttacttgaactgttgaacaactagttattagtgctattcaattagtgtttatagttgttaaactaagtttttagatggtcagtatagcatatggtattttgtagtctcttctatatggtgattgtcagtgtaggtttcaaaatggcgagttttagaattatcaagtttcgatgcagggagatatggtccttgcattacctgactcactggctaacccctgttgttgcaacctgcctcgggccctctccaggtgcctgtttggttgcaaagtaggaggcagggtcacaacacaggggcattagcttcatagcttcaaatttgttattttatacctaacaccttacagtgctactttattgataacaagtattcctacccatcatgtgaccattcttttaactatgttgttttccatcaccgtgttatcaggtaaaagtgcaaacctgggtcaataacagagaggatggtgagtttgttggtgttggtgctcgttttggccccactatagagtcaaaggaaaagcatgccaatcggacaggactattgttagcagatcctattgactgttgtgatccccccacacagaaggttagcttactggaaatgacaaattaatagtttgtgatttctcgatggtgtcctacattcctacccagtgactgattattcctttatctaggttgctggagatgttttgttagtgcaaaggggaaactgtaagttcactaaaaaagctaagaatgctgaagctgctggggcttctgctattataatcatcaatcatgtccatggtatgccttatttgtgaaattatttgtaaattcatacatataatgtcctttgctttatacctgcgttcagcagctgattagttagtagatcaagatgttgaaatagtcgaatagcataatattctcccttaccattttactatgcatatgcatggtggaccactataaaccttctatttaccattgccatcctacctgaaatctcttctgtgtcttacctttgttaaaagatcatttactatctattgtaagattacaaccattagtctctttaccctacataggcagatcaacatatattcttgccatgggtgcaaatagttaatgtgcgtgcgtgctcaagatacttcctaggttgttttatcattgaaaggtcaatgtctatgcatcacacccaaatttagttgcagtggttcatcacttcatattgtttgataagttagatacttacttttgactgtgttatcagatttttttcaaagttggacacatgtattgcaccagtccccacatgtttgtcaatataggtgagcactcataaatgtggttaacatgtgtcctgcactcctgcttccacttgcagagctatacaagatggtctgcgaccgaaatgaaacagatttggacataaatatacctgcagttcttctgccaaaagatgcaggcaatgatttacagaagcttcttacacgtggtaaaggtaaatcttcaaagccttccaccacctgaaatcttgtgccatgtcctatgtaggttttttttttgtttcaaattttgttttgtcttggaagttgttttttggccatagtatctaacatatgtatcgaatttgttttcaatttctcagtttcggtgcagctatactctccagaccgtcctctggttgatactgcagaggtgtttttgtggcttatggctgttggtaccattctttgtgcatcatactggtcagcatggagtgctcgagaagcagttattgaacaagagaagcttctaaaggttctgaacagaagcttatttgactattgttctggattttgtttgcttgaaaagagaactaacagtcatttggtttatgtaggatggccatgaaagttcactaaacttagaggctggtggttctagtggcatggtagatatcaacatgacatcggcaatactgtttgttgttattgcatcttgcttcttgataatgctctacaagcttatgtctcactggtttgtggagcttctggtggtcatcttttgcattggtggtgtagaggtgtgttcaatgccattccattttccctgtaattaattagctggatatctggccctaagatctttatactgtttatccattgaaacatataatctgtatgctttccaaatgctaaatttcacaaattgtgaggcagtactatatgaactactatgaaagaatcatgccaaactgagcaaggagctttgtggtttctctttaatgccaagcatgataacttttatcgaatagaagaataaggccctgtttgattcagcttaggattattataatttggattattaggagtaagctgaaacaaacaagtagattattatgatagattattataatctaataatcttctatggatgagctttttccagattattgagtggctaaagacccactacccttagatgcctctaataatccagagaaacaaacagctcacagcttattctatgtcagtttattataatctagtttatagtaatttgatttgataatctagattacaataatcttaagctaaacaaacagggcctaaattgaccttagttctgttagtcgatattcaaaactaatatttatgtttgtatgattgttgttcttacatttcttgagctcattgtgtgttctttattatttgtttatgcagggtctgcaaacttgcttggtggctttattgtcaaggtacatttgtggccctttgaaattgttttatgggctaggatttatatagtagacacgtctcagatgaatatttatatatcatggctgtgggctgtggccaagagaacataagaaagtttccttaccagtaatcatgtgatctttcagatggtttaaacctgctgccgaatctttcgtgaaagtgcccttctttggagcggtttcataccttacaatcgcagtctgtccattttgcattgtgtttgctgttatatgggctgtttatcgccggatgacctatgcttggattgggcaagatattcttgtaagtgaagtttcgtttttataccctcaccctcaattgggatgattaggaggttgaatgttaattaacatggtgcctgtcttcagggtattgctctgattgttactgtaatccaaattgttaggatacctaacctcaaggtaattattgtgccctgctgcttatgcttaccatatagtggggagtggggacttttataacaattcttgctctttttccatcatgatcaggtcggatctgttcttctcagttgttccttcttatatgacatcttttgggtttttatctccaagatgtggtttcatgagagtgtgatgattgtggtaggtacagatgactactttcatactgtgatgttctgcttctgcaacttgcgaaatgctaattgccctagcgtctgctcgtaggttgcccgtggtgataagactgatgaagacggtgtgcccatgctgttaaaaatcccacgaatgtttgatccatggggtggattcagtatcattggctttggtgatatacttcttcctgggctgttgattgcttttgcattaaggtcagtgttaaattctgcccatccgctttatctacaagtctttgcctaatcctgctatattaacgtgcaaggcttttgcatatttgtgaaaaaaaaatagcctaatcctggtgggctatcataaattgctcaggaggcttgagaacaatcagcataaattgttttggatttgcaggtgtctgagcacagtacgttattgagcactacactgatttttttttcaatctctctttgtaggtatgattgggctgccaaaaagaccttgcaatctggttactttttgtggtcaatggttgcttatggttctggtaagacgccacttcttacatgcacttccctgtgttttccaactctctaggtacagtttgccagatacagcttaaactaaattgtcctataatgggatacttttgatagtagaaacaaaattacaatgggacctttggtttatactcccctgttattttttatatgatgttggttagttcattttttaactaaccagcgtcatatatttagggatggacgtagtaccttttattttctgctggttgatggaaatgacaaaataaaaggattatcatacgtgaatgtgaaagaaaagggattctcatacgtatacgtgaacaattgaaacatctaacaaaacccgtgcggcaacatgttggtgttttttacctgtagtctgacatactgtattcttttgccccttctttaggtcttatgatcacgtatgttgccttgaaccttatggatggtcatggtcaaccagctcttctttacattgtgccttttacgcttggtaagtaaagccttccttgtgcctggtgagaaggttcatagcttcaggggtttagtgctctcattttaacacggcaccatgctactgcaggcaccttcatagcgctcggcaggaaacggggtgaactcaggaacctctggacaagaggacagcctgagagagtctgcacgcacatgcacatgcaaccttcaccgaaggacaccaattgtgatgctgtaagctcgtaagaaagcttatcagcatggccttggagttggagaggctcactgatacgtctgatgtaaattatatttgctcacggtattgtaacataatatgttctctggaggcagaatcgcgactccactgacttgtagtaacgtagtactacgtagaagtatttgtaactagggcactaggcttcaatgctgttgtcctagtatggaactacggatccatgttgtcatcactagcaggcatcaatcttttgtatagtaaccggttatatagttttgtggccacataagaaatgaaggaatttttaagtgattttagttccatggtcctaacaatccatgaacatgtccatctgatccatggcgaatggactcttttttttatatacagattctgtaattctcaaactgtcatgtttcttcctgacaatataactgtgtcgaatcccagataggagtgtcacagctatggaaaggaccatgaaggtataaaccagcttctccagttttttttcttttccctggatcgattctactccatcggtccctaaaaaaaaaaaaagtcaaaccttaggttttcatatccaatgtttgactgtccgtcttatttgaaaaaaatatataaaaaattaaaaagataagtcactcataaaatattaatcatgttttatcatctaacaacaatgaaaatactaattataaaaaaaattcatataagacggacagtgaaacgttggacatgaaaaaccagggtttgtctttttttttttttacggaaagagtatgtctgatcatgtggacgcgtggcaagagcctagtagctttgtcggtgcaggagatatgcactacacgacacacaggggagggaatcatcatagatgaacagttgttgttcagcaaacggcaaatacagaaatactgtgatgtcctgaccatttatttttctaccaagacaaaaccactccatatcactacgtcactttgatgtatatatgcaaatggaagtagcatcatttttctaaccaagggcgtgcacctttatgaattgattttttgtatgcagctgcacaggtgatgtgaggccggagaccggagtggaggggaggtggtggtgcggctagtggtgtgtggccagcgatgaagcaacggctgccgtgcccgtctctgtcctggtccgaccgcccaagctccccttttctcttgtgcagtacagtttcgccttcttgtttctcgtgtgtttttccttccgtttgctgctctcgtagaacggtagaagtagtagcagtagaccttgttcgtgagtggttgcggcttctgttgtgtttggtcgcctttgttcgctagtgcatctggattccatgatcatgatcatgatgtccatgcagattgatgtggtgactgactgactgaatgaatgaacagctgcagctatagctgagggtgtgtttagttaacgctaaaattagaagtttggttaaaattggaatgatacgacggaaaagttggaagtttgtgtatgtaggaaagttttgatgtaatagaaaagttgaaagtttgaagaaaaaatttggaagtgaataaacgagtgagctctccttttccttttgacccactctgctagctgcccttcttcccctagtggccattttcccccatactagccgactttgctactacttgatagtcttatcactgagaggaatggacgcacattattatatgctagattgttaaatcgagaggggattactgttgcaagtgagacagtacctagcacataatatgaaggtatatattcattcttcttgggtcgagttgttagcaatgctgaattatcaatgtttgccaactgctagcaattaggaagaatggctagtttgtggctatgattgatcgatcatcaagctaaagataatgctatgcaagtcgagacagctcgatgagctcacacaaaggataatcttccaaactgaccactctgtccgtggtcttgtttggatcctccgagctattaaatagtcctctgaaattttgctatttaggattattaaacgtagattaccgacaaaaccgattccatagcccctaggctattttgcgagacgaatctaatgatgtatattaatccataattagcagctgattactgtagtattactgtagcaaatcatggattaatatacctcgttagattcgtctcgcaaaatagcctagtggttatggaatgagttttgtcagtaatttacgtttaatactcttaaataacgaaattccggagggctatttaatagccctccggatccaaacagggcccgtgtcacctaaacaaaaatggctttaatttccagaacctgccccgtagcaaacgaacccatactactaatctatcatatcatcttgtgaattatttatctctcgctgacaataaccgatgaaccatcaaattcaagcttagtaacagtagcgcttcctgtcatccacagattaatcaaggtaaaacaaaaacccctaccatcatcgttgtcgtccactaattactaaattgccgactgctaaaacaaaatgaataattaattaattaattaattagtaaagaggaagagaaagagaaggccattggtgcagacgtagtagtggagcaggagctataaaaagaagcaggaagccactcgctctcctcacagccacagctcgccatcgtcgtcgtcgtcgtcgtcgtctccggctccggcaagagagctagtagtgagtagtagaaagaagaagaggcaaattaatagtaatggaggggaaggaggaggatgtgaggctgggggcgaacaggtacacggagaggcagccgatcgggacggcggcgcagggggcggaggagaaggactaccgggagccgccggcggcgccggtgttcgaggtggaggagctgacgtcgtggtcgttctaccgggcggggatcgcggagttcgtggcgacgttcctgttcctgtacatcagcatcctgacggtgatgggggtgaacaagtcggcgtccaagtgcgccaccgtggggatccagggcatcgcgtggtcgttcggcggcatgatcttcgcgctcgtctactgcaccgccggcatctccggcgggcacatcaacccggcggtgacgttcgggctgttcctggcgcggaagctgtcgctgacgcgggcggtgttctacatggcgatgcagtgcctgggcgccatctgcggcgccggcgtggtgaaggggttccagcgggggttgtacatgggctccggcggcggcgccaacgccgtgaacccggggtacaccaagggggacgggctcggggcggagatcgtgggcaccttcgtcctcgtctacaccgtcttctccgccaccgacgccaagcgcaacgccagggactcccacgtccccatcctggcgccgctccccatcggcttcgccgtcttcctcgtccacctcgccaccatccccatcaccggcaccggcatcaaccccgcccgcagcctcggcgccgccatcgtctataaccgcgcccacgcatggcacgaccacgtatgcaaccaaccattatttaatgctttctcaactacttagctactccatccatccgataaaaaaccaatcggaacgtgacacattctattattatgtatctgaatatatatatactatctaaattcatcgtacaaaattcgttttttatgggatttgagggagtagttgctaataatcacacgttaatttagttcattgattagtgctaattgatggatggatttgtgcagtggattttctgggttggtccgttcatcggagcggcactggcggccatctaccacgtggtggtgatcagagcaatccccttcaagagccgggactaattaattaccatgcaccatcatcttaattaagcgataattactctgaaataatcaaccgagttgatgctgcaagatgatggaggatcaagtctctacagtactacgtgtgttattaccgtctggtgatcgatgaagctagccgctgcataattataagcgcgtttatatatatctgatgttgctgtaattatatctatgtgtacgtagtatgtttggtgtgagaaatggtacttgtgtgtgcggaggcatgcatgttcttggttgcacgccttcagctatatatagctttgcatcaattccatctccaaatgtgaattttactagttactatttttacctcctctcatcccctcttatgttatgtgtgatcaagtatttgatcccctctcgttaagtaaatgttaagcatgcgtatttgtaaacttgttagtgctatactgatatgctatcggccctatcggcgccattattgccgggtcttcaaatgccacggtgtatgagaagacttacgaattgtgcaaaaaaaaaaaaaaatcttgctgacagccataatcatacatacatactagctatgagcctatgaattatagcggaccatgcatcatattttacttgaacaagtaaaaactaaaagcataagaaaaaagtaaacaattctttaaattcctcagttcaatgtatgaaaattacttgtggttagagctattaattatagcggaccatgcaccacattttacctgagcaagtatgaacagaagcaaatctaaacaagcagtaatgaactgtacactgacagacaagttaacatacatcctcagctaggttacaagcagctttctgctattagaatttacaacattcacatgacttaaaggtgtgtttagttcacgcaaaaattggaagtttgattgaaattgaaacgatgtgacggaaaagttggaaaattgtgtgtagaaaaattttgatgtgatggaaaagttggaagttttaaaaaaaaaagttgggaactaaaccaagccttagaaaaaagtatctttcctgacagtaacataccaatatacagctatgaattatcacagtttacctgaacgagtaaatacgctttacttggaagtccagttttagacctaaaaccagcgtataataatataggcatgtaagtaattttaatagctccataaaatatgtttagatcgatgggctgttttccggattaaaattcagccctgtaagtccattaaacaaaaaaaaaagtccttcacagcccacgataaaaatccgacaaaattaagtcgagctcgtccccgcagctgcaccagtgtttaatttttcggtttagccgattgtattagaggtcatcgatataccgaaatttccaaaagtttaaacaaatgttagtaaaatttaaacaaaatattactaaattcacaaaaaattaaaaaaataaaatttcaaccaaaataatattatatcgggggatccgaaatgaccgaaatttctaaccctgagctgcactcccttgccaattccgcctcaccacatatataccttcaccctgctcttgagtcttaatgagacaagtgtggactgtggagagtggagtgttatgccacttccgttgaaatggatatcatcacttaacttccaagtccggtaactttatcatcgctccacacactagatctctccctttttttctttcttccctccaacagctgcggatctataaggtccgacaacctggatccagcgtctgcaagtctctaccaggtcaacccctacctttcgagtccccacgttgctggcctcaatgacgactataactacaatgtgcgcggcgacggggtagaagaggagacaagtcagtggctagtaggtgcggctgcgcatgcggagatagagaggaggaacggcgatggctcgtggagaaggagcggtgccggtggtgcgtggaggagaggaaaggtagacaatgggtgctgtcagtggaacaagtttgttttcgccacccatcccaattgagttatttgccttttttcttcaagcactatttacatatgggatactagtcattgcaaataatggatggctggttttaattgaaaagtttgagacaacaaggttatttaaagtgacaattggttgattaaagctggattaatttactttaattgcgttcggtagctgagagaagatttctctcgtttgtcgcgcgtatacttttcgaactattaaacaatgtgttcttttacaaaatctttttataggaaagttgcttttaaaaattatattaatttaacttttaaatttaaaatagttaatactcaattaatcatgtattgatgattcagctcgttttacttattgacccatcttctctttcccttctctcataaacttacggaatcattgcgtcgagtatctttgccccttcccaccagcgccaagaaaaactccagtctcgtctccgctccttgcacctgcggccagcgctgatctccatccatctcgcgagcatagcggagccggagcggagcaggggaggggcgccttcgtcctactgcatcctggtgagcatccacattctcttcccttttcttcttctttttttttttaacgaacctccacatttctctttctcatccatctgtgtcttcctcccacttaattttgtctcgattttgcttgcttctcttctagatctggaacgagccttttctcttaatttcagagccttagcctctcttaatacaagtaaaggtttggggttcaattgaacccccatttcccaagttggatccgcccctgaattcttcgggttttcgcctgctctcggttgcagggttttgtgctagcttgattcggattcctggtgctcgattgggatggattcgattttgatcgggttgtctgtttccatcattggtcctgcaatttcaattcgaagttacatctttctataaatctgctagtgttaaacccgtgattaaatatcccttcttgtgctgatttttaaataattcgagctcggattgcgcttacaaaaacagtcttgtgcattttgaattcgcttcttctttctcaaattcaaaattacagtacaatttgcagcaagagtgcacatatccttaattgcatgtactaggatcctgtgtctatagcaaaatacactgttacagctgcgatcctcagtcaacagaagttcatatccagactttgattgcattttggaattctggctttgcatgcaatttttcttctcatatagcattcccaattcatcctccatttaattaagatcttgaagctagacgatctgtaaactgactgattagatcgggtttctgcgttgtaccgtgaaatttatactgtgttttacagtaaattcgaatctatacttaaaattattgcattagaattgggcacatcagggtatcagttgggagaaaatgcatcacaagactgtactgtagcaaaattattctaaccgacctgttcattactgtagtctgcaatctccgtaactcccactttaaatgcgaatttactgaaagtatgaacacaggagagttacctgccccaactataaattcttggtttactccacataattttacatctagtacacagaattaatgcaaatcacctagccacctgctaaatttcataaccaaaattgatctacacaatttcatttctgatttactacctggccacctgcactgcttttgtacatattccttagacgcaccactttgacgagtgttactccagcaagtaacgagcaattcttgtagccagctagctggtagtgggtcctggtaagtgtctctgccgattcatcaccataatggttagtggttgggagtcactaatgctcttcaatctgtttgcaatcgcatcagatgagagatttagtccgatccggatcgagttgcatggaggtgtcacatcatcttgatcgctttcaggcttcatcgcccccccccccccccccaatggaaattaatctatgcaaaatatgaatttcctgtgtaacttaggactcaagactcgattttgaatttcaaattccctttatgcgtggtcaaattttaatttttaatgttgagctagtttcagaaattctgctatgcctaataatagttggtatttttcttttatttaggactagcactgttttagcaaagttcaccaatcctgcagatctcacatgcagctttcttggttcttgcaccatgcaataaatcttgaacatcatgctaattttggaaattattctggcactgggttgatagagctatttattgtttgctgttgagagtcaatcatagaacacttcacagtattgagtttgtttgtgtactgattgaatttgatgcaaaaccttgaaccagggagagatcagggcagagaatcagcatgatgatggagactgaactatgctcttcccgggttctgtctctgcctcggtacgatagtggagatgaggagctctcagtgcttcctcggcacacaaaggtcatcgtcactgggaacaaccgaacaaaatctgtcttggtcggtctacaaggtgttgtcaagaaggctgttggtctaggaggttggcactggctggtgagtctcccactgaattttttagtatcccacttaaactttactttattgtgtttttttttatcttgaaatgtttgtttcacaagtgaacgatatagtactgatttttttgttttagaaagtagctaggcaagtaattctctacatgtttataaaatatcatctgtgttaataataccgtcataatctataaccaccattgtttgagattatatgttttctttaagtgtttatgagcttaggagttgaactattaaatgcaaatataatggaaaacaataccaagacctgagatattcatgaaaatgcaggttctaaagaatggtgtagaggtgaagctgcagaggaatgctttgagtgtcttggaacctccaactggtaacgaagacgacgatgatattgacggcaacaattcattctgtagcagttccgacatgggagacaaagacatggactattgtaagaccatcctgtgataattgcaatatagccaattgctttaaactaacaattaacagtgtaatcaactaacaattttcttctgcttttgcaagtagcgatcatagaataccataaaccaacaaagccaagagttcggcatacaaggccctggtcatcctgtacaaaatccagcaaccgaggcaattttcaccccagttcaatattgcaaacggtaattactaatcgagatatcaggccgtgtacaatccaaaattaaagccagtgtgacccttggatcacatggcttggtccatggttatgtaggatctattgttgtcataggcccttctgctgttttagccaatgcatcttgcttattatgaacagggcgaaataactttcattgatcattcgttcagtttgctgggaaagctgctaggattttgatctgtcttttgcacatctcataccatttcctttttctgagcaaagtatgtttcttaccttttgtttgcagagagtaaacctgacaagactcggaactcctaccctgtggagatactggaagcacttcaatcttgtaagcagcctggatccaacaaaccttacatttcatttccatggtctaatgctgaaaaactatgcacaggtaagcatgaaccccgatccatcaaaggaacagctcttccatggggtccagcagcattttcagtctcaggtagcagctgaaaacctattacacaccacctataccttttagataggcagtttgtattgtagtataacctgtgatcagtttgtagtcttaacctctggctctaatctcctccaaatgctaaataaaaagcagcagcaattggatgagttgcaggtgattctgggcttcatccaggcagcaaagaggctcaagaccctgtaccactcctagcctgtaacatctcggtgtgtagatctcaacaaattagattagatgtctctatgtatgtggttaaattaatcttagccttgagagagctgaacagaaaggagatagtataagaggtgcattcgatcagtaagtaattcttttttacttttacctgtaaagagtttatgtaaccccagtcacagtgtcagcaactactgacctatcaccatcatctaaatactactccctccgtcctgtaatataaggatttcgatattttacttgcattgtttgatcattcatcttattaaaaaaattagaattattattattattgacttactttattatccaaagtattttaagcacaacttttcgttttttatatttgcacaatttttttaataagacgagtaatcaaacagtacaggtaaaatatcaaaatctattatattatgggacaaagggagtaatagtactactctctccgtcccaaaatatagatatttttagttatgaatctggacaactatgtgtttggattcataactcaaaaataactatattttagtacgaaggtagtaatacagtgtgaagctatgatgaatttggatgtcaactcatccaatgcatgttttccccctaatcctcaactcatcccgtctctaagatctctggttggtggtggtaagagcaatgcatcctttgttcttttctttccttttttttttcttttgcatgaaaaggaggcacgaggatgcaggcgtatgacccacccgtggtctatggttctcactggcaggggaatactgcaggatagatggtgggaccggacgcacgggaccacgtgactaggggtgaaatcgggtcgggttggatcggatcccatcctttccatattctaacccatatttccttttaaattcggagttggattttgatagtgccgggtaacatatcactcatcccgtatcatgtcccatattatttacttcgaatcggattcaagaacggatatttatttgtatctctaattcatagatattaaatataataagataattaaagtactactccctccgtttcatattataagactttatagcattatccacattcatatagaattatataaatgtggataatgctagaaagtcttataatatgaaacggaggaagtaaaagatatacatcaagaaaaaaatatacaatattatacgtgagcatgtaaataagtgattaaccaatattttatcatgtttttatgtggatttataataaattttcatatgtattttttaatacgggacatacggacggatacgtatcttctcgtatcctaacccatatttttccaacgaattcggatttgaagtcagatagtatcgagtatcctattttttctcctatatttcttccgcaagtctcggatcggacggacggtcgggaaatatccgccccattttcattggataggataaggcacgggtttgctagggtggctcatgatagaccgggagcatgtgtggtggcattgcctcgggcaatgtgcagcgtaggggacggatggaatggattagaaaaaagacgatgatgtggctactactgccccggtgcaaccccccaacccttccattcttccctgccttgtcctctttgtacccacttgttaaaatcattttgagatcgagtttttttcccttttttttttcaattggtagcaaattaaaacaacctttggaagaattcagcgggcaaattaatttatgtgaaattctgcagttcaaataagctgttgttcatgaatgcatttcttgagggtcaaacaaaagtatactggtcgtccttaggtaatttcatacaaattgttgaaaataaatagtggagtactacttctttttgttctttacaatgggttcttgggagataattatgagggaatagtcaacaacaaatcatgtgaatcatgccattcacatattttgcattgagaaaatcaggaccgaaagtttattacagctggagagaggactcacagattttagtatagtaatagtactaaaatcaggaccgaaagtttattatataagatgcttgcctcaaatgatgtgataagtaacaagtagagaaaaacacttgcttgatcaggtaattagcagtatatatatataaataactagtatgagggagatggtgaggggggtaaaaaaaaagctggtacttacattgtgattacggttacgacgaaccttgttattcttcatcttgagaggatatggaactcgattaattagtgagaattgaaaggaagcggcctccgatggatcgcgcgagctctgcaagggcaacaagccaacgaatgatgagaagagaaaaatcttgaggaggaggagagaatgagatgaggacctcacaccgacgcgggctcaaatgggccgagttagatcggctatgttaggtgctagcccggtgcattttataggcccgttaaggagtacaaggccctattgtctaggtctgtgggctttctctgttatgggcttaatgtattttgggccctgtaggcttcttgtacgtttttctagttttacagatatatgatcatagcggtcagtttacttgaaaattgcataaacatgttaactgcaaattcattccaagtatcacaaaagaaaaggaaatggcaagctatatttgagaaacgaaaaattagggccatatgaccgcaaatgtgttcacaagctttaaagttttttaggtataaacataaataaatgcgaatactcaataatattaatagctatacatcggagagaaaaatgaaaggaccatactcgtgcagtgtcactgtgagctataatttttcttttccggggttttctttgattggatgcaacatcacttttaacaactactcctctgcataatgggtttactggcgttatcacttcgctattaaacaaaactgcgactttgctcatccattgacctagctagctagctagcacttccttttcattcctcttctcttctcttttcttctctttattatctatttatttatttattattgttgttgttattatttggcatctggctatcgctcgacgggtctggcataatttgctactactagctaccgatatttcttagctggcaaacttactgttgttgtacttcaacatacgcgaggagagaaggattacttcatttatttcgagctgtagtaataatttagtttataccgaactggtaattatatctgtaaccgattagatggacagataaaaactagtaaaacccttgtttttttgtcatgatcctaccaattgccaagtacagtgtagctagcagtgcttcccatagacaactaaacaaaaagtctattgcatcatttcactttattgaaaaggttgggggacaaggaaggattagggtctaagaactcagctcctttgttaattattattacttttttctccccgagacaatagatgcaagattagccttccccgcaaaaaaaaaaagatgcaagattagccttgttttttcatcacagtgctcatgatttggaaataagtgctttttgaggcattacattgtttgatcttccaaaggaccagctagttttacattatgcatcttgtagacaatcttggacataaagcaatgttatcagagatcaggatccatcttgcagacaatcttgggcataaagcaatgtcatcgatgacattgctttatgcccaagattgtctgcaagatgcataatgtaaaactagctggtcctctggaagatcaaacaatgtaatgcctcaaaaagcacttctttttacaaatataggttggcatggttctaacaaacccttaataagaatatgatcttgaatagatgtgatcaaaaatttttgaacatttcaactgcaacattctcagttcagaggaatgtttgatattgcaaatggaaggtgcagttgaaactacatttttttaatttttttttgccagcttactcctatgtgattactttttcctagcttgtttctcgagaggatgtcgtagaataataataacacggcgattccaagatcttgaatacatttttacgtatgccttaagattaggactcgatctctgaacttcttttatttaaaaaagtgcatgatttgaataaggaattgtcggtgcgttcaggttcaggatccatatatttcgctccattgtttagtaaaaaaaaattaaagggagatttcaattaggaacaactttgtatggagcagtgcagtatgcactatgcaattggaggaagcacatcgtcatcactgttgcataatatagtttgatatatactctctcaataattaggacgaaaactgctgttcaagtttgacagatatcataaatgacaccgcttttctgataacaacagtgcatcacattttattttatttttttcgcaaagagtgcaaatctctgatgatctggtaaatgaattatagcttctgaatcatatatggctccactgttatcacattttttttacaaattgtaatctgcaatttgagaaaacttagtcctgttcatctgctgctcatgtgtgcataaataggattatctttctggccatgaaaaatactcacgaacagaaggaacagaataaatgacatcgatatgagctgaattattgtaccagtatatacctgctaaaatccgacacattatgtgtaatatatttttattattttttaggaatcctttccattatgttgaaaagaacatggattaaatgctagagagtacgtagcacatgcttcctcgattaaaaatgaagaaataaaagattttgcagctgaagaaaaactttttaagaagtctgaaatcagtatagaaaaaaataaatgcaagaggctgcaccaagagctgaaaatggccatttcaactcatccataaagtcttttgagtaggagtgaaagaacagcctttatcttcctcttgtagacaaccttcgatcttagaacttaaccattttggtatttagaataaccactcactctctctctctcttagggggcggatcaggaaaaaaaattgggggactcaatataccgagtacaccgacataaacacataatctcggtgttaaactatgctaaaatgctattaggagatctttagtacattctatcttatcaaccatgacgaaaaaatgaaaggggggactcagggggtatccataggttcggtgggtgagagaaaactctaagtcctccttgtacccatgttggatccgctcctactctctctctttttttaagtaccattacatcatgctgtttcctaagggaaaaacaaagtaagtagaagtggaaagaactctagaattttctggggagacaaaaaaacaaaaagaaatatggtcctccttatataaaatattgtaataataaaaataatatgtttggaaggaaataagtagtgttgtaaattggcacgggagtatgatatgaggagaggaaaagacaaatccacgtgtcgttgtgagccccgccgttggccatatctgccgcggaaagcaaaacgaaagcacagcgccacgtttggccgaattatctggagccactggaagtgggccccggggcttgtatttcttgggaatacacgccatcataagaaaactaccatacgatttttgaaatgctgtgaacaaattacaaactagaagtagtagtttcatagagtttcttttaaatcttagtataatttgttaatgataattatactacgtagtacaattgaattggccgctgcgttgtgtggccgtaacagaaaaaaagaagaaaaaaaaagagagagcgacgccaccacctgcccttggctatccgttcttctttctctctccctcaactaaaacaagctaggaagaaaaagggagaaaaaaagaggggggaaatccataaatcgccgcttcttcttcttcatcttccttgttgctcctcttcgtcttcctccggcctcctattgtaattgctgctttggttctttttctccgtgacttgcgtctcccattcctctcgcgccatccaatctttctatccaacaattaatccccttcctctctcttctcttctcttcttccccaaatgcttcttcctcgcattcgcaatcgcaatcctgccctaatccccaatcccaatccaatccccccgcattaatcctaatcctaatcctaatcctaatcccaatcccatggacgagtaccaccaccgcatgggcgccgccgccgatttccgccgggacctcgaggacctcgtctgcgaccacctcgggggatgcttctccccgacgtcgtcctcgtcgtcgtgctccgcggcggggggaggggtcgccgcggggcaccagcccgacgaggagcccgagtcgtctgccgcgcggaggcggaggcgggagtcgcgcctcctcagccggtgggtcgcgcgccaggccgaggaggtgctctcctccatggagcgcgaggtcgagcgacgcaaccgggaggccgagctcctcgcgctcgcacgcctccaccccgtctccaccctcgacccctcctccttcctcctctcctcgcccaccgcgccgccgccgcgcccccaggcaccctccccgaccgcgcccccttccctcctccagatgtggcgcgagctcgagcaccgccgatccgacgccgaccagcccttcgaccgcgagccctcccccgacaccgccgaccgcgagcgcgtgcgccagatcgcccgccgcctcaccgccaacaccgacgtccccaccgccgccgccgctgccgccaccaccggggagtggctcggcgagacggagaggcagagggtcaggctcgtcagggagtgggtgcagatggccagccagcctcgcgactcccgcgtcgcctcgcgcagggacgacacagccgctggcgagagggagaggcgaggggagcctcctcgcctccgtggccgacaagcgcgtctcgatgtcatcactcggatggcccgagagcgccaacgcgagctccaggggatatcagggtatcacattgtgtccgagttccctcaccgcagccgcaaccgcatccaggttggtctttgcattgcattgcaggaatcggtcatctgtaatgccgacgacggtgctctgagatatgtgttgctttacagggattgcttagggggaggttcttgaggaacgtggttcttccagttgaggaggaggaacgaccaccatccgtggcggcgagggagctcgggcagttgaggcagagccatcgtgtgtccactttgaggttagcaggcattccagttccaactttctcttgtaattgtagctatatattgattggtatatctcttacatgaatgcgagcatttccgggattttcgttgtatcctttcagtgcaaatggatttttctggttgtatcttttccactaacatctatcaaagaatgttggcgtagaaagcgctgcattatttatactattctgacaaatcgtctggttcttggataattggtagactcgcttgctacttgctactctcttatgtagcttacgaccccacttgcacagcctcatttgtttttgtggtccccttagtattgtatggtgtttttgtgtggtacattatgagcccactgccacattactcgtttaatccattgctcttccttctattgagctgtggtgatgtacaattgtctgtttggggcatatgagcataaaattccaccttccacttccattgtgattaataacataattgacctaatttgggattttttttttctaaattttaaaaagggaaactttctgatattatctttctgatattatctacatgttgatccctagttgtgtcaattgtcaagtaatttctattggtaattacctgtgaatgcctagaatatataggtttcctttgttggaaggattattatttcagaagaagcgttaaggtgattgtgcattcttggattgagggctttagagttgggtgcatctgttggttcttttagtttctactgccaatcctgcctggcagatgagtatcagtcacatatgtgaccgttacgtttagtatggaatgggtgtccaatgctagacagttagaagcaggtacttgtaagttgtaaaccatagttgtggtagaagttgtttagaaggaaacttccatctgaattatgaatcctgttcaagtagatgatcagaccatttcagtacattgaggagaagctctgtgcaagatatggtttagcaggacattgttttttttttatgatttatgcaggattttgtactatcgtcaagctaaaacttcttttatacttaattcctacagaagcactgtaatctgaaggactgaaactacttttaaaactagagcatcaaatgagtattttcatcacagcaagtatacaggcaaggtttcaggttccagttctactaattatactggtccctaccttaacttgtcagtcttgctctacacgttagggactgttcaccaaccaatttgtcctaaatggtactatgaaatatattgatgatgttgactagtagcacactatggaagttagggcccctgaattgaatccggcctctctatatcttcttctaagagccgtcctagtagatggtggtaccatctattagctggtaccccaactgcttagtaggtttcatcagtggtgctgttttagtgatctcctgttgcttaagtgctccttttattcatgttactgacaacatttcaatatgatataaccattatctttaacggtatactagccatggaattttttactgctgcattgaatgattacatcttttatgatttagagtagtttgtaaaaggagcaacatcagcactttcatttgatgtgtatattgtggtgatttttagaacttctcatgaccagtaattagtatggtcataccatagtagatggaacgagagtaaaatctaaagtttcaaatgccaaacttcaaactgtgtcatgcactcatggtgcatgtggtacataagttaagcacaatgaaggacacatttattcttggttgccataccatgcaactttaattctttctactaatacgtgaagtgcaagtccactcactttttgaaatattagaaccagaattgcttctactgaagtatagttatgtattatttggctaacataacactgtccatcaatggtcagagttgcacctgatgctgtgaaaaattcacaatgccatgcaacatgaaaaatgggaagtatgttcttgtgcactgccggttaggcttaatgcagcatcagataaactgatgacagcaaactgccaaagaatgcatgcctcttgccattgtcttttttgagttctttgcacgtaaggaatatctatagggtttatgatattgcatccagctaatgacaaatggctcaacatgcttatttcagatcagagagtgctgtaagtagtgaagatgttagccggtttgattcttctgtggctgaaagtgttggagtactaggtagtgacgaacctcaacaaggggctgaggtcagggccctcactggtactgagaatacgacccaaattatgcttgaggatgtgggtttacaggaggcagatgcagaaaatgctgccatagagtcaccaagtgtagctttggataacatggttgagatgcatgaaactcaagttgacaataggctgcaagatgaggcaggacgggatgcaagattttggcagccatctctggacgactcacttgataggtggcccaatgaaactgcagaggatgctgaaagaaattgggaagataatgcagaggaactacacagtgaaactatggaggatgatgccagggagcatgatcatcttcaagatgagcatgatgaatggcatgatgacgagtctcatggtactgagaactggcaagatgatttccaagattctccacttgacatgggccccattcctagaactgaaaatagattcatcccgccagatgatgacaatgtgtacagcatggaactgagagaattgcttagcaggtatattgaccttcagtactagaatttcttccaaacatattcttttattgatattaaatctgttcttattctgatcaatgaccacgtttgtactttcaggcgaagtgtatccaatcttcttagtaatggttttggtgaaagtttggagcgattaataaggtcatatgttcaaagacgtggtcgtggacccctcaattggaatctcgatgcagctattccatctgtgaattcaccaaacgaaaatcaggaacaagagaggaatgctgaaactcggcaattccaagctcctgttaacagacctgcgcttgttatccctcccccacctttgccaccccgacagccactatggcacagagaattgcgtcataacaactggagcactagacacagggtacatcacagagatcccgtgcattatctcttcattaaatttttggagctattgcataatagttgtttctttatctgtgctatttcaataccatgctttgcaaatctgttttctgtacacacattgttaatatcatgcaatgattcatgatctgtagcgtctttagaatttgtttttccttcatactcctttttcctaaatgtgccagctgccatgggtccatgacccatgagatgtcagaaccgtgaaatttataagtgacttttaattagttccttttgcttgaattaagttgtgccctgtatgctcatttagagtttcatcttggaggatttattcagctttgcatccttgcaggaatgggatgctattaatgatttgaaagctgacatgggtagacttcaacaagggatgagcagcatacagaggatgctggaggcgtgcatggacatgcaacttgaactccaacgctcagtgagacaagaagtgtcggcggccttgaatcgctttgcaggacctgaaggttgtactccattgctccttgttgcatactgagatatctgtgcatcatataactgtctttgctaacacagaggacacggcacacctaactacagctgatagggacaatacctgaatttccttattatgttgttatgcactttacgtagtttaagttttatttccggtaattatgctattaatagacattgtgcatgttgtcagttagttgcgtgtttcttatttttgtcatacagtaatttcgctgaaactctgtatgtacagaaatcactgaaacaacctgtcccttttatttttcagggtatccgacggatctatctgacgatggatcaaaatgggatcaagtgaggaagggaacctgctgcgtatgctgcgatgcgcaaattgattctctattatacaggtcagcttcacagctaaacatgtctgatactttgatgttactaatctctaaccttttttgtctgatgtacttgtaaaacccatttggtgatggtgacagatgcgggcacatgtgtacttgctcaaaatgtgcaaacgagctaattcgcagtggtggcaaatgcccactatgccgagcgccgatcgcggaggtggttcgggcatattcagtaatgtaaagttgtggaaatacagtagggaagggaataaaactgatggaaaaagcgaagttttgctgcacgaagctttgttcaggaaaaaggggaaacaagagctctgctgctgcttcttcttcattctttttcttcttccatttttgtctgtcctctctcgtcttcttcttgtgtatctatcgatctactacaggtttacatatttgttgccttgctgttggccgcagcgcgagcagcaaagggcgtgttaattgattgttggaaagagtttgcgatgggtaggactggagtaaaaagagagcggctgcccattgtaagttctttccctgtatttatgtcctgaactgaactgaacagaagagacactggcagttactcatatagattattaatctaatcccacctcttttgactgaactattgcattattatcatgatctttcttcttccaagaagcccatgccttgcggttgcgggtcagccgtgttctgatgctgacgatagtggtgtgtgtagccagtatagaatagattaggttattcgggttattattatctaaaaaggaggtgatgcagattgtcggctggggtgttgcttggtttgacacgcgtggtgcattggcattgcgcggtgcctgcacacgtgtaatgtgcgtgcatgtcaaaaccaatgggagcagctatatttactatatttgtggtatcacgcttttccctaataaataactagtcaaaaaattattttttagctaaaagtaactaaaatgtactccctttttctttaaatatttgatgccgtttactttttagcacatgtgatcgttcgtcttatttaaacacttttataaaatatataaaactatatgtatacataaaagtatatttaacaataaatcaaatgataggaaaataattgcaacatggactagagatataactatgttttcacttaacaccatatatatttgcaagcttttgcattttgcaccaggtcaatggtttagactgctatgttgcttctccaagtgcacataaattacttcacttataccaataactaacgcagcaatcgcaacggagcagtagctaaatttgcacaaaatcaatcaagtttaacccaaaattaacaatctccctaagaaaccataaataaagtacccgtgactccgtcctcttttcaatcctagcatcatgcgagatgttctccattgatgaaactgacaaagtcacactgcctgatgaagccggtgagggtttcgatgacctgtctaccgccgccctagtgactaatgttgaccacagagttgcttgacattatttttactgtagactttttaattaattagaactgtcgatttactagatcgatcccagggaagatggcaatgcagaacggaggtggagacgagtggagtccaccacctcctgcttgcattgcatgccatggacagagccacggtggcagctcaaacccttcactccagtccaaagtgaaaaagcttgtcaacatatatggtgttaagtgaaaacatgaacttatccctagtctaggttgtaaataaaataaacggtcaaatatatttaaaaaaaagtcaacgatgataaatatttagagagtgagggagtagtaaaagaatgtaacgtcgtattaacctctctaaaccccgtggcgtcagcgacgttttgcaaagcattcctcgcgctttcagctaattacgcattagtccccggtagcatgcaccatccgatctcgcgctactattttttaagcaagctggaaccaaccagaggagagaggagatttgccggttctccttgctgctggttatacacggtaatcgagcttatctaaccatcaggacccaaaaagaacccatcgcattgaaaagaaatttaaacaaagatttgaattgttgaccaattatcgctagagcccatgtggcattcgatcttggccaacgatagaatctgggcccacatgtcagcgagtacatatacagtatatagatagatagaagaaggaaacaactcaaccgcagcagttgtctcgtctcgtcagttgagttgagtagtgttgacttgagattcatcacatctgagtgagtaagagtttggaaaatgggcggcggaggagacggcgaactgtccccggcggaggccaggctggcgatgatggagctcgccaacatgatctccgtccccatggcgctcaccgccgtcatccgcctcggcgtccccgccaagctctgggcgggaggcgccaacgccccgctcgccgccgccgacctcctccccgcgggccacccggacccctccgtcctcgagcgcctcctccgcctcctcgcctcccgcggcgtcttctccgagcacaccggatcatcctccccctccccgcgccgcttctcgctcaccgccgtcggccgcaccctcgtccccggcggcggcggtagcccctccggctccggcgcgtcctacgccgactacgttctgcagcaccaccaggatgcgctcgtccgcgcctggcccctcctccacgaggccgtcctcgacccctccggccccgagcccttcgcccgcgccaacgccggcgtccccgcctacgcctactacggcaaggacaggtagattagaattagatcaaccaattaattataatctgctagctgcttcctctccaatctaatctccatcggattcggacttgcaattgcagggaggcgaacgaggtgatgctccgggcgatgacgggggtgtcggagccgttcatggaggcgctgctggagggctacggcgacggcgggttcgagggggtgagcacgctggtggacgtgggaggcagctccggcgcgtgcctggagatgatcatgcggcgggtccgcaccatccgggacggcgtcaacttcgacctgcccgacgtcgtcgcggcggcgccgcccattcccggtgagtatgagtgacgtcatcccagcatatccactgtggctcacgtttgtctctccatggctggttggcttgcttcacgtgacgtcgattcatccacaaggactcgatcgtttccttcatcactacctaccacgagtttcaggaaacaaacgatagtgaagtactccctcggtttcaaaattttaaaatgtttgaccattcatcttattcaaaaaatttaaataattatttattcttttcatatcatttgattcattgttaaatatactttcatatacacatatggttttacatatttcataaattttttaataagacgaacggtcaaacatatgctaaaaagtcaacggtattaaatattttgaaacggagagagtatttgtgttgttagagatgaaacagtggttacaaactacaaacaagaagcgcctgggaaacgatacgtacgcctaataataatacaggagtagtacgttggtttgcagctacttcacgtgtgatgtttgacataacggatcacgagacgccacacaataatacaagtatactaccgtacatcatgcaagtgaagcacgagttgtacacgtcgatcaatgtaggggactatttgtttttcgctaaaatatgcatggggctcagggtcattttgttgtgttcctgatgctaagagcaagtttaatagtatagccaactactaactctaaatcatatatagtcaatttaatagctaatttatacaatatttacctataaacatatattacataattaatatctggttccacctgtcatatacacatatatcttgaagtccgtactgcagccgactacaaatctgtagcccactactcttctctcttagagcaagtttaataggatagccaactatatctccaaatcatctatagccaatttaatagccaattcatataatagttgcttaccacactattaatacctggttccacgtgtcatacacacattatgtcttggagtccatgctacagctggctacaaatctgtagtccgttgctcttcttttttatctccttaaaatatgttcatagctagcttatagtctgctattagagcaggtacaatagcagactattaaccacctgcaaacatattttaataagataaaacataagagagaaaagcagtgggctacagatttgtagccagctgcagtgcggacttcaatacacaatgtgtgtatgacatatatgatcatatattaatagtataataaacaactattgtatgaattgactattagattagctaagaatgaattggagctagtagtgggctatactattaaacttgctcttatatccgctcttatcttttattttctcaaaatgtgtttatagttagcttatagttcgctattgtacatgctctaattagtgaccattaaaattcaggagtgaggcatgttggcggggacatgttcaagtccatcccctccggtgatgccatcttcatgaaggtaagtaatagtataccccccccccccccccccaatttttctttctgcatcagattctgtccaagaattcaaacatgcagtgaatggctcattaattcccattttgtttttttttttgcatcgaattacgtatgtacatgaattaaaacaaccctgctagttcatttttatacggcatacgtatgcagtgggttctgacgacatggacgaacgaggagtgcacggcgatcctgagcaactgccacaaggcgctgccgggcggcgggaaggtgatcgcctgcgagccggtggtgccggacacgacggacggcagcacgaggacgagggcgctgctggagaacgacatcttcgtcatggccacctaccggactcagggcagggagcgatccgaggaggagttccgccacctcggcctcgccgccggcttcgcctccttccgggccatctacctcgaccctttctacgctgtcctcgagtacaccaagtagtagtcattcattcatgctgcatcaatttgctgctgaaatcaacaaccacgtttccttccttttctttttggtctcgtgacactgtcaaataagcagtatttcaattgtgcaatcagaccatgttcttttgagcattcacagcatcagagtaatggaaaggtgtagcagtttacgattgctagcatgcagttagcagtgtgcccactaccaccaacgttttggtacatgatggaagggggaatcaacaatcactgcccaaacatatgtggggagtatattcattcatataacaattatttcttaatagctacggtcacaaacattaacactgttgtttgaaacgttcgccgctgctcgacaacattaatcctctttcttatcttctgctgtggtagtagtagtactagcgctttggggttcaactagaggttttgattcacttgcaccctgtacagcaaaaggagtaaaccaatcacatcagaatggcctgttgcaaactgagttgctgcaaaattccctactggctctagtatgatgcagtaccatgcataaaagctagctgtctctatagagtttgtaaattatcagtgggggcatgctaagtgttaatatcttgcataatgaaatggtcgacttaaggcagaaataagtatagcaaatactagcatggaagcttacttcattgttctttgccgcaggcttaaacgggcaagcaggcggggctctttcaggcctcctgtattcccatccaaatagtcgataaatcttgctctggaatgtcattcagaacatgaatcaattttcagaatacagataacaggagaacctagaaacatatgcacattgcgtgctaaaacaccaataaggctacttcaggcagcgctaaactagaccgcgtacatcaagttttcattaagaaaagagattggcatagttcagggcatgtttgaaacatggacaaaattcttcatttgttccaacatttgacgcctttgctgccctcaaatagaaaacactcagcagctacagaacattattttatttctttcagcttgggattattataatccagattattgagagtaagcggaaagaaacagacaacttatttaagtagcttattataatctggagcccagcttattataatctgataagctcatttaggtgagctttttccagattatttggtgaaaaattacccaccatgccaccccactctctctttagacttgcaaacccaataatctaggctctaataatttaggaaagaaacaactaaccgcttattctactacatattataacaatctagcttatagtaatctgactcaataatctagattataataatccaaagctgagagaaacagggccttagttatttgttatccagagtaatatgaatagcaaaacatctttcagcattatttattgtcaagtcaagaaggggaaccttatgtagccttttgcctttcagttactatttatgctatatctttcggctctacgaggagtgtaactattatagtccctccgtttcacaatgtaagactttctagcattgctcacatacatatagatgttaatggatctaaacacatacatatgtctagattcatcaacatctaaatgaatgtaggcaatactagaaagtcttacattgtgaaacggaggaagtatgatatttcagctgtccaatgagcataactatgggaacatggttacaaagaacggcaaataatcgtctcctttttggggaaagcacacaacaattatcaagattcctttaggaatcctagtggataaggcacagactggcaagcgaggactatagttgccaattacttgcagtattcgataaccgtggttaaaccaaaatgtgcagttatagatagttccttcctgtttgttgctagtcaatcaagctaacagatcaggctaacctaagatggttgaattatacgctcgctagtaaagaaacaaccatgaaataaccattcgtgagaagatctgattgaacaaaaagagagagagagagagagagagagagagagagagagagagagagagagagagagagaggggaaagggattggggcgttacgaggatgaggtggaagagcaaggggagggcgttgacgacggggatcaagaagaggggaagcaagcacgcgaggcaaacctgtacatggagcacaaatcgaatcacgatgtttcatcagtaatcagtacaagaggggggagcagacataataataatcagatcagagcaaaagttgctggattagaacacggggaatacgcaccatgtcgccggatcgagtcgccttcgcgggatggctggctgctcgccttgcccttgacttggaagctggaactaggagaactcttcttctgaatcgcgaatggggaattggagatttggaggaaggaaggaaggaagcaagtgcaaatctctccgaggggacgggggcaatgctttgggccggaaggggattgagttgagcgaccaacggcccaactataaatgggccggaagggtgttgcgacagccatgtcatgggcctgtttgttatcgtgccgaactgtattgctatgaaggcgcggcccattaatggacgtgcggcagacaggaaagcgcgtgttggcgctgctactgtgtcgtcgcctcgtcggtgatcgcatcgaatcgatgcttcatctcttctttattttttgatgcatgcatgcatgaatatgcacgtccgtacttattggtgagacaccaaccaacaacgcaacagcagcagcgaccggttatcatatcagccagagtatgcactgtcttgacacgatttggaggtactccctctatttcataatgtaagactttctaccattacccacatatatatatagatgttaatgaatctaaataaatatagacaatgctaaaaagtcttacattataaaacggaggaagtagtgtagaagaaaatggcaattaataaaaacataaatattagagctagtatcaattagaaggggtaaggctagcccaccatcctatggagctaaccggaaaactaatgggtgtttctcgaaacggtaattaatcatgttgagaaaacataacattaattaaacagcatgcccattcaacattaattaaacagcatgcccattcatccattgcagtagtatatatataaacaaacgattaattgacaaacaggggcacaatataattaattagacgacaaagatagcttaattgaggatcggaggagcgtattagatggagtatacatggcggcgtattagataattaagcagtagttagctagccgtggtacgacgacgaggaggagttggaggatgaggacgatgggtgcaggtgggtgcggcattccggggtgagggaatgatcccgcttggggtcgtagcagtagttgtagaccatgtggaagcgctgcgcccagcgcatggcggcgagctgggcggcggtgaggtcgccggcgacgggggcggcgcaggtgcggggcgcgtgcggcgagcatccccggaggaggaaggccgagaagcgcgcgacgaacggctggtaactgtagtccgccctgtacctgccgtcctccgtcgcccacgacgacgcgtcccagatggagccgtatacccacatcggcctcgccgggaaccccgccgcgccccccgcgctccgccgcccgtaccgccggatcggcacgtcgtccaccaagaagctgatcgatccatcataacacaaatacattattcatgcatccatgctagtattaacattatactccctctgtaacaaaatatttaacgccgttggctttttaaacatgtttgaccgtttgtcttatttaaaaacttgtatgaatattattcaaaaacttgagtagtagtagtatatttaacaatgaattaaatgataggaaaagaattaataattacttaaatttttttaataagataaacagttaaatatatttaaaaagtcaatgacgttaaatatttagagaaggagtgagtatttatgaaattaattgaacatatgtgatcatatactagcactacatttatgcagatgctgggacgaacgacgacagggagtcggtgtcggcggcctaagatattgatgatcgctagctacatgccaaatcaagcactgtactgtactgctgcaatcgtactacgtgtcagtgtcgccgctgccacaagtgtttaaagcgttggtacggcaccctgcagttttgccgtacggcttgtccatgcttgatactcctactcctacttaatttgcgctaatataatatcgacataaatctttcttgctaccataggctatagccaccgacaaggaaacatcaagatccatcatcggacattttcgtttagcccaattaagcaatcaagaaagtgatgaacactgcttactctgtttttaagtactttctctattttaggatataagatgttttaattttagttaaagtcaaactgtatctaatttgatcaagtttataaataaatatagtaatatttacattactaaattacttttatgtaattaataattaaatatattgttataataaatttatattgatcgataatattaatattttttctataaatttggttaaatttgaagcaatttaatattgactaaaattaaaaaatcttgaaaccttaaacggagtgagtagataatataattgaatttaacgtaacggttgatcattaagctgtaaattaagaaatgatggaactgacatgatgtggtcggatgtccagaggatggcgtagtggtggaagtcggcggtggggtcgaaccagaggtggaacttgatctcgcggccgagggaccggggcgggtcgccggagccgagggagaagacgttggtctgcagcgtgtagggcttcccgggggtggtgccgaggaactccatgtccacctcgtcgtgccaccccgggtgcgcctcgccgttggacaggtagaaggcggtgatcacccccgccgtgtacccgcgctgcagccgcacccacgccccgaagtacccgctccggtaagcccgccgcgacttgaacccgctccccgaccgccggtccagccacaccgtcacccccgtctccggcgccgccgcctcctgctgctggtgctccgccccccacaggctccggaagtcgcgcccgaactcccgcgctcggaacatcctgctcgggtacacccccggcgacggctgcgcttccgccgccgccgccaccaccaccgccatcaacgccaccaacgtcgccgccgccgccgcgacaccctgctgctgcctccgaccaatgatagccattgatcgatcttacaaaccggaggagttgctagcttaatttgttcagggcgaatataatgctagctcgtgcaagtttgtgggtggtagcatatctcctatatataaataagctaagtagctcggccggcttaattatgcaatgtgtgcttaattacctaaatcattaatcttttttcccttaaggatgatgaacagagaaatatattaaagcttgtgcaatatatgcacactgtgatctttgtgatatgtctcgctcatgatcatttgctagcttaattagctaggatcgatggtcggtgagcgagcatgactgatctaaccgcggacaacactacactgcatgcccatttattactcacagtgattttttttcttcttgtttggttcattgaacaacccaacattgtggaacagccgaaaccgacacaatttcttatctttatttttttttctttcccccatttgagatatcagaaaaccaactaaccgacgaaacggagctcagcagcccatacaacgggcccaactctaacaaaagcctatttaacattaccggcccatatagatagaaagcccactaagccctcgtgaaatcccaggtagaagcccatttaacaattagttggcgtctcgcaatacacagacagaggttgctgctactgcggcggcgccacccacccccacctcgccgccggcgatggagccgccgcctcaggcgggcccctccccggccgtccgcgtcctctcccgcacgcccccgccacccgcctcctcctccccctccccgccgccccccgccgccaccccgccctcccacgacggcgtcgtcgccgtcggcttcgtcggcggcgggggcactgcccgcctcgccgaccggatcctggacgcccatgtgttctcccctggtggctccgccaggaccctcgcgggcggagtcaggtaccaccgcgacggggagaagagggtggtgttcctgcacctcgctccgtcgccgccgacacctctggagggggcgggcgatctacgggagctgctcttcatgttctccgtgagtgtttataatcgtttcgatgtagatcatgagatggtgattctagctgtgaaggaggtctcagcttttgttttgccctgatatgatatgaagctatcatagcgcggtctctacatttgtattaggtcatctacctctaaattgtcacgctgtgtagcagccaatgcaaactacagaacttggtacagtaatttagtggctgggttcaatctttctcatgcctaactggataactttgacaactacgatcggttagttttgaagtggcgatgttgtgggagataggggcatcatttatccagctgttacctggaccgtgggaatgcaaaataaactaaaaaaaaaatctgtggttagctgataaatgcacttgtttcctaacttgatttgccagggagaaaaatttaagatgacacttttaagtttgtttatccagttgtagcaattaaattaacctatttgttgtggttttcctaccttgcttgcaaatcctcgtgcgattcaaatttgtcagtaacatttgattggtgctctgatcctagaagttaccgtcaaactttagctaatggaaatttaggattcagttgtttggtaatgttgattttgatttgcttttattttctatacgttgccaggtttgccatgtaataatatttctccaagaaggcttccggttcgacacacagattttgaagaaattccgtctgttgcaatcctcaaagcatgctattgcaccgtttgtgaagtcactagtagctcctgcagtgccatcaaaagttgctcgctctaatactccaacaaagcctactcacagggcctcatccatctctcctcctgcacgccgtggaggtcgtcatccctcagcaatctcgttgatgtcaggaactggctcacatccttgtatgctgccagggctatgcatccctgttgttctgtttgtctttgaggatgatatcactgatgctccaggtgctccgacaagtccggatgatacgaacgacacatcatcaaatcaagcttctaacactgatggcttgccaaaacctaacatgacttcaaaaggttctagttcagtggttatgcttgctaggccagcaatcagatctgatggtactttcagcaagaagctgcattcctctgtagaaggtcagatacgtttcttgctaaagaagtgtcggacacttgtgggtctagagccagggcatattgtttcgaggggtgtcagtaatgtgagccacctacctctgttctcacttgatacatcaagggtcgttgcactgttggatcggtcaattagtaagaaacgtgagccattggatatcattgcaggactgtttgaagactctttgacatccaaatcatcattggatgtttcttcgctggagaacaattgccatccagcaacccatgaagatgttcagttcatcaaggattttatatttcgacaatcagatgggctgagaggaagagggggacactcaagcaatacaactgctggtcctgtttctggtgttggaatggtggcagcagcagcagctgctgctgcagcatcagcagcatccgggaagcaaatgagtgctcctgatctccctactttcgatacatggttgtctataagttcatctattttgtctgcactgtttagtggggaagatgggttaagtagttcccaaaacatgaaggcatcacctactcatacaagttcatttccaaagaacgatcaacttccttcagcaggatccaacgcaattcaaactgctttatcttgcttggaaggcaataaggggcttaatgtgaaattttcttcatcatggtgccaaaggatacttccagctgctaaggaggtgtatttgaaagatttgcctgccttttacccaaccagcatgcatgaagtacagctacagaaagctttacgatccttccactcaatggttaaaggaccggctgtccaagtattctccaagaagctaaaagatgaatgccaagcaatatgggaatctggaaggcagcaatgcgatgctgtcagtcttactggcagaccatgtaagcaccagagacacggtaaatcctctccatcagatgcagcgttacagcattctagtggatatgttttcctccatgcatgtgcctgtggccggtcacgccgtcttagggatgacccttttgattttgaggcagcgaacatgacctttaactgcttctctaattgtgaagatctgttacctactcttgtgcttccaagagagaccaatgctggtgcatttccagtatcctcttggcgtttggtgcggcttggaggagcaagatattacaaaccaacaaaaggattgctccaagcaggtttttgctccaaggaaaaatatcttttaaggtggacgatttctcttgggaaaggacaagggaaacatggcactcatgctaccaataaacctttctccacggcatctaatgcagatcctcaggctccccctattgttgctggagaagtaaaatcggccgtgacccaagtcacagcagaaattaaatctatgaaacttgaaaattctagaaaacaacctgaagtcgagtcaatgaacaattcaagtattaattttggtaaaggtcttccaaactttactatgaagaagccttttgctgaagttgttgctggccacacagcaagggattctgagtttcctgctctccaacagaagaggccattaaaacctggcaactggaaagatgagcggcaagtgagtggagcagaccaaactaatggccgtggtcatccagctcttagtcaaggacctatagctgacaatgaatctgagaaagtgagcagagataagagtaatggaagtgctggcggaaagccatttctacagatagggagcaatatagtgccaatggttgtcggaaaagagactaaagaagttaatcaatctatacagcagttcatggtatatgtcggatttgagcacgagtgttcctatggtcatcgtttcttactgtcagagaaacatctcaaggagattgattcgtcttatttgcagtttgaaagatctaatctaaataatgaagcagaaagcaaacatggttcacaaaagttgccccaaaatgcatctagattagcagcaacaatggatgtgaccagcggagggaagctcaataggccaatggattcatcagggagaaacagccagcagcaattgcttaagcccagggttgacgctgagaccttgcagccttctcactggctttcagatccacagaatgaaagaaagggagagctttctcttcattatgttacacttgatgatggtggagaagcattttcacttctaaacagaaatctgcccatatatatgcactgcccacattgcaagagctcagataggaagggaaatcaagatgcaaaggttgctgctgctgtgtcacaacttcaacggatttttattgtaagctgctctccttttgaaccttgtagtatttatctgttctttaatattgtcttttcactgatacggctactctttttggtgaaggtcacacctgatttccctgttctgctggcaagctgcccagttgtacagtttgaggcaagtacaatcatccctactcatgtagtcgttttatcttctcaatgttctagtatcaagcaaatgaatctcttcttgatattttagtatcgaacaaatgaaattctcacttgtaaactgggatcatgggatgcaatttttttttacgacatgcatttcttaaatattatgcgagttaagtttcgttttatctcactggcatcaggcctcatgtttgccttcaaatgcttctgaccatgatcaacaaggatcgttcagtcttggttgtcgagttgtccttccacctgagagctttcttaccatgagacttccatttgtctatggtgttgagacaagagatggaaatacagctcccctgaaataccttgaggaacaaccagaactcacagcttggcttgttggaggcacagctttgcagattgtatcagtagggcatactaatgagaaagaagcaccactgtgaagtgcgaaacgtgggctcttaagatttattcgttttggtgtatcctatttttgcattcagtgatgggcaattggtaagatgatgcactgatattgtactttggtcattacccatctttagtcaacttatatggatattatctacttcattcatttttcaggttccagcattgaatttcaggattccggcaagtgtaatggctcatgatgtttacatggaggtctcgcctctcctgctggatttacgatgctatgctattgatacaactctagcttccttttgcattgagaaacaggagctctcttgacaagatgaatgatgcacaatggatgcattggagtgagctggtgatgcaggtacgcaatgtcagttctaaactttcactgtagtacacgagatgggattggtatatccagtgaacccgatgtttgttattgatgcagggaactggacatgtacattaataggtgtcaggtaaaatttcactgttgtatattaatagatgttccacgacaattcgcctttgtctcagaattttagtcccatgagttagtccgttttagcatgtaatggtttaggcttttagtcagtctaaatgctgctgtactgttgggcataataataaattttacactgtctttgtaaagcaagaaatgatcactgaatgacatgctgtagaaaattcttgtttaaagttttcttgactagtcatatgtcctacagaatttcttgctgaggaattcaggggatcaacttcaagaagcgaaaactaaaacccggaaactcaacttggtcattttgcagcctttattggagagatgaacgctccaggttggcatggcagcagccccttcttgtagcctggaggttggagaatgttgaaactggaaggaaacgcatgaaccagtcctgtttgacaagtgtaaaggcacagaaagaaagtgacgagatcacagttgagccaagcctgtgcgacgatgcctgctttttcttcacctgcaaaacaaccgtttccacgtgatctgaagaatcattcattccagaatgctacttattgtcactcactgttcctggcctgacacgttagttatcttaactatggcaactcctatactgttttgtcagtcctggttgtgttttttttcccactccatcgtctagtcgtcactgaaggatcaactgctttgacaagcagatgtgctgcctaatattttcttggtcgataactgacctggacatgaacactctcctgcctaatcgaccaaagtcgaagtaaatgcaaacagcagctttgattgagagagcccttgctttcttttgcaggaactattagtaatttgcaaccactcaatttgttcagttatgcttgatgggctcatgtgttttttgtctgaataccctgctgttaattaacggctgaaaataaaccaagtcagaaaattagctctgcccaaatgatgtgactcagtgtaatatatgagcagctctactccaaatgatgtgactgttaatgttataaagaatgttaaagaagattatctttgcctagcaagcacacaacaatacaattattcctgacaggctaatgacaagcatcacatagctatgaaaaagaacatgcacattttcgactttaggcatcgatgtgtctatgcgtaggagaaagagaacccaacagagtactaatatgtctgtggcaacttgataagcctcatcttggcaagctgaaaaggagaaagtggaaccaatactcaataaattaaagcactttgctaatcttacctgctttcaagacagggacatctccataacacatacgtaatctctctatctctctctctctctctctctctctcaaggtgcatcaagtaccaaaaatatgcatttaaaaatagtgtgaattaggtttgcttcttctctctgaagagtttcagaagacttgttggaaaatttgtgtgtgagagagaatcaaaacagagtatataaaagaaggaaatataagtacaaattaattgatacatgtatacatatttcttggatgatgccagaaatcttgcatgtgattttagaggaggaaattgaaagaatgtgaaagccatagacaattgcagctagatatgcaaggacggcagttggagttggaaattgggagctgtatagtacaagaatatatatatatgatgccaccaatctatagtgcactttcagtgtattggtgatgtagcaaatggcatggccggctgctctactgctactgctactcttattgctctactgtaccaatatatcagcacatgtttgattgatgttcctcttgcctaccaatggggtggggcccacattggaagcttgcaaaggcaactaacaaaaaccatatactccataagctaattacactagtagctagcactattggactactagtacatctcataattaattaaaaaaaagtgcactgctagctactcgatccacttgactcgatcataccctgcttaattagctagctaccttactggttagtcagtacaactcaccagattaatcatggagctcccgtgattaagtcaggtcgaaatcaacccacacgacgagctaatagctgaagaactgtatatatagctagtaatcagatgacaccagctaactaacggtgtttctttatgcaacagattaagccatacaaatcatgtactagctagccctattagcttcagagtataccaactgatgatcaattaagctagccatcagaacgaagaagctttatttgggcaaccgcaagaactcaaagccatgtggcaataatgtcaactccaaccccagatagatctttttattcaaaaagataaatctctttaattaatttctagttttcttcgcagtttacttttcttctgttgcagaaagacacatttttttttcttttttgcgaggacagaaattaaggctgaatttttggtctacttacgcaaactaagagtacacagcaaaatagctagctagtactgcatatatacaagacgtgcacttcaccaatggcatatatatcatcttactgcagaatatcattgatcgatcgatcgttgctgcaagatggtaccggccggttggttaaattataaataaaaaagtcagtaatagctagcttaattagctctttgatccagtcatatatgtacctacgtgtaccaagaatattcaagacgtactactctggtacgttcaagactagctgcaagatacactctctagcttgctaattaattaatacgagtataattcagaaatcagaataaaaatcgatcactgataacataaatatcagtctaatctttttagataaggattttcattaactcgagagtagtggtactgatcagtagtgacatatatacaaggagaaattcatggtgtactgcatgcaaatatatacgcgtcttaatttaatttgcgacagatcgatctatcggtcgacttgcatactgcttgcatatctatctagcttagcttaattattaattcaacgcatatttattcagcaggcaggcaggccaaagtacgtacatagaggagaagattagacatgagtgatgagatgccatgccgtatagtatagatatatatagagagatatgatcgaccaacaatctatatgcatatggatcatatgcatgcatgcatgcattctgcaggtaagtatatattccatccatccatcgatccatgatctatagctagctcagctcagctcatctggccggcctatatgttcgtcttgctgtcaaattaataaaaagtaagtacatgtcacggaaagtatcgcctgcctgcctgccttttcacttcagctaccttacctctgcagctgcagcgatcgaccacttggatacacttgctgcctactgcaaacaacgactgatttttaattaatttgcaaattaaacacctagctatatggagtgcaccttaattcagaactgaaattttgttagttcagcttaatttttgcaatcaacaattaatagtgcagcttgtggatatgtacactacattaataaggggacggctgggatgctgatgacatgaacagtgtgtatagttggacatgcagtgatccaaattgcccaatttggaatatcaagtgacttcttgcataagagggaaaatatcagcactcaatagatagatattcacaagtacacacacatgcaggggatcatgaaaattctgactttaggtctaagtacgaaaaaaaatgattttcatcgatcaacactaatatattaattaactttagtggtaattgaagatgcatgcatgagatccacttcagagatcgactaattaattgattaatcatatagtatatgttattatctccttaacttgttgctcatgtatatatgctagtgcagagctgaagaggatcacagcatgcatgcacactgcagctggctgtggctgcaggctagcttgcaaacaaaacaagctcccctgcaggaaaagcacctgatccggcctaatttgcatctttcattgcatatgctgatatgcatatgcccctgtgattaatttacttacttgatgctggagaaaccaactaataaagcatacatacacacacatatatccaagggcaagcaactaattgagcaagacaggccagtagtgaagctaggcaacaaactgaaacaactcactcttgctcatcaaatatatatatatatatatgccaattatattaattaatttgcccaactctcactcatactgatactgctagctagtagcagcttgcattgttggctagcttccaattgtcttttgcttgcaaccctctcaactcccttggcaactttgcctacttcactatctctatctttattgcagcaaggcagctagctactatagcaaagcccaaaaggaaacgtatgtactaatgtacaccactacttgaaacttaccaaattaataaatacaattaacgtaccaacacgtattaagaacaaacagcaggcgttaatcaaaatttaatttctcccccgagataaattaactaattggaagtgatgtttgcagtgcagtgtccgaaagggaataatattgcatcaaaagtatataaacagatcatgctttatatgtacagggatatttaatttttgcaaacactgccactgaacagaagtgattaagtgattaagctagctagctaactaagctaggatacagatcaatttttttaaaataaaaaaagagagagaaaggaatagttgaatagtccgtagccggccattacattgcacccactcccttcttaatttccatgagaagaatggcaacgaattgcattgccaccatcttctttttttcgtcacattttcagacaactttccaccactcactcgtgctcgcacactctcgatcgatcacactccaagtggcggccaaactttaataatttctggacaaaaattgatctcaaacttgattcattttcatatgtataaatgtcaatcaatccctatgtatgtatgtatgtatagttaatcttacagaaaagaatcgaaagaatcaatagtatatgttacagtttccagcttgatgtacatgccaaacaaatttgtaagtaaacatgcatgtatagtgattaatcccccagaaaaaaattaagaagaagaagtgaaaaaaatgatcaattgatcagtgttaatcacgaaaagaattcttgagcttagctttgctcatgtcatgtcaataatggcagccgaccagcgcggcggaggcggtgagctgcagaattggcttcttgccgtcgttgaactgcccgccgagagccaggagcaccggcggcggcggcggcggcggaggagacacggactcctcgtcggacggcgccggcaggttgaggtcgagctccaggttgatgctcgtgcttccctctttcttggtgtccggggcggtggcggtggcggcggtggtggcggccgtggtcgccgcgcgctccggcggcgcgtgcagcggccggtggcgccgcatgtggccgcccagcgcctgcccggagccgaactcggcgccgcatatcgagcactcgtgcaccctcagcttgttgattatgctgccggcggcggccacgttgttcaggctcagcacggtggtgacgtccgggaccacgacggcgtccgcctgaggcggcggtggagacggtgccgacggcgtcgtcgtcgtcgtcagcggcggcttggacttgacgacgatggcgttggtgttggtgacgttgttaacgttgtcgtcgtcggcgccggggaggcgaggcttcttgtggctggcgcggtggccgccgagggcttggaaggtggggaagcacttgttgcacgtcttgcactcgtagacgtagaacccggccctgacgccgtccgccgtggtggccgcctccgtgtacttgcggctcgtgtacctctcgctcttcaccaccaccaccggcggctgcggcggcggcggcgcgggcgcgggcgcggcgagcaccggaggctgcgcaggcggcggcggcggcggcgctggcgtggacggcttggagtcgacgacggcggcgccctgagcaagcaggatgaggcagtgcgccatgtcctcctcctcggtggtggtgctctcggaggaggaggccggcgccgcgtggtggcgcggcctcttggtgcgcttgcgcttgacgaccccggcgtgcttgtcctccacggacatggcgacgaacgccagagcgcgctctgtgtcggcgtgatcggtggcttgcatggcgatcgatcgaaagcaagaaacgatggatggaatcgaagtggagaatgaatagcaagtttcgatctctttgcctccttatcaatggaggagaggaaagaggagtaggaatggcaaaaacctagcctagctaccaagctgcctttgcttcttcttcttcttcttcttcttcttcttcttctcttcttctcctgtgatgtgttggtgactttggatatatatgtgtcttctcttctctgcaaggctttgctgttgctttgcaactcttataaccttccactctagagagagagagagagaattaattagggagagagagagaatatgtgtgtgtttgtgtctgtggtttagtttaattaggtggttaattacagcagctagcacaggtgcatgctattgttagaaggtgtaaataggcagtataggagatggagcacaagaagaaaggttaactggtggccaaggaacgggcacgccgagagtgtgtgttaaaaggctccctcttaattacttgtggacgattttgatgcctggctagctccctctactagctgccttttaacttcgtgtgccaaatatgtttttacatcattattagacacccttaatttagccccttgcttgttttccaaatgcttaattacttaccctcttgaattaacccatcaaagtgtatgtgtgtgtgcgtgagtgaggatgaagctgtgcctactcaactattatactagtatctatagttagcatagctgttgttttctttttggtgatgaattcaagtaatatactccctttgtcggcttcatttctagtatttttcagataaattagtaatgatgagaaataactatggtgtctcttattcatactcctggttgtatttactaattaagctccaattaaatgccttagtctgattggtttgaaccctttgaaatctaagtttttttatgggatgaattttaagcaccagaaattaagtctttctagaacggagagagtagacagaatagatagagggagctaggtgacaacatgtttgccactactaatatatgtggacatggacaagagattgaaaaggatccaagtaggagtggcgagtgagtaatttgtgcgtggtaacaggtaggccaagaaagaaaagaaaccatgcaagcaagcccaatattccctgggggatgatgtgcatgtttggatgtgtgattcctggggtgatagtgtcacactgcaaggctgtcttgaaccacaggagaaaaaatactctgctttttgatctgcttctcatgacctatatatggttctttctatttctttgcttgttttaataattagtatgcctttaaatttagtaataaaaggtatatgtgaaagtccaccaaattgtttgatggttcttaataattgagatctttatttacatggagagtagtctttggcagcaattccactgatgatgaagcgctaatagacatgaacagctagttttgcttggcagttggcaactaaaattaggaggtagtgaggtagtggtggtgcagctgcagctgtctctactctccattggccacacaaaaatacctgcaatttgttgtcacttgtcaagtactcacttgcatgtatccccacatacacacagtactttgatttttcttcctttttttttcttgtgaacaaacacaattgttcacctgttctttgattgcattgcattggctaataataatagtcacttgctttttaagctaaaccaaaagctagcaaaattgacatgttctgatgcaaatggcacagctacataactagctaattaattcgattgttcttgatctctctaatctgataccctaagtagttagtggtcacaccagttttgtatgtgattttttttttcatttcttagttcactggatctcactagcttagatttggtttgggcgatactaatagttgctgctgctgtggctgcactgtctcaatcaagtaggtcgtcctcaaatttaattgccacaccctaaccactgttcccgtacaatgtatttgtacacgatgcgcgtctacttatcgcctaagaaccatacaactttcatacatacagtaaacactgacgtggcttagctgataactcaattaactacaccaaagtaattgagtagttatacaatgcatatatctaaatagcaaaccttaatttcatccaattttaatccttcaagttgaagaagctagtagtgaagacgatctttgtgttattgtgtgagatataagtcaacgagtgatcgagggaggaacgggtggtgactggttagtagctgattaatagatgattcttgacgtgatgaattgttgtttgttgtgtggggcaacaaggaacttcattagaaaaaagaaacagagtttaattagtttggagaccaatgccaattggatatgatgctgtggtgtggtgggggcaagcaaggcatcagttggaagctggtctagcttagctagatatagcttcctttctctctctaacacacttcctctctctctggatctctcaacactacacatgcatctacacttgctggtcactcacttgttctgcaatccaaactaccgaggaaattaatgatcagatcagtggctgctacctgcctttgttttctctttgccatacttaagcagtgcagaaaagataagtgcccttgagcttgccatgatcctgcccatgattggcaattagccaagttgtccctcatgtggagaaccctagctttaaggatctaattagtgcatgcaacgctagttggacaactagtacccctgaacgtgatcacttctgttaagctgaccattatttatccaaaagattaacaaatctttgtatacacacggcaagccacctatccttctcttaaaaaaaaacaaaaacttctgagagcagctcaaatgtgctgagagctgatgtcattgcctgatcaagttagcaaggtaagttaattagagagtgcatgacactcctctggataataaagctttaagcaagatttgttactaaaaccttgtgtgcttttgccctggccaaagtgcttagtagcatatttcaagtcactatatagggatctgtaccagcagtgattcgggcacacaccaatgagactgagttggggtgaattaaggaatctgcctgcctgcacagaccaaaaagaacacaaataataagtgaacagaataaaatccaggaaacacacagtggattggaatatactagaagtgatgaaatgaaatatgtggtgcagttgatggacacccaccaagcacacataccataccagccatggatcatccagctgcctgcatatattgttaagtagtagtaggatggagatgagctgcctgactgacctggctcaagtggatgatgagtgaagcagtagtgggacactcgacagtagcagcagcaccatccacaatccatgtataattagcagggggatcactggctgcaagtgactgggccaccactcatcacgtcatactcatgctactagacaagagagatccagtgagaccaccagtataaacgacgagatgatcacaaaaattaaggactgttcagatgattatcatgatggacggaaaaaagaagaagagagaaaagaggagaagaagtgtgacaataaatggagagacgagattcactccacatgacaacagctccccgaaggatcccaagcagaagcagcagctgtatcgtgctgtctgtcatgcttggagaaccgttaatcacgatgcatcatcaggttcaggcctcactgacagagtgacagacatgtcttctccaaacaaacctgcaggccctcaagtcaattactggtagttggtgttactactaagacgtactttgtggatacacatggcaattgacacttgtgcagggtagcaaggaggacataaccacacttccaacttccaagctaggatgggaataattcaatatgtggcaggatgattcttcagacttgttgagaagccattgatccataatatgcccctgctgatggaattgtatgattgccccaagttaaattagtggcgtggagtgaagggagagtcaatgcttcatcacataatagattgctgtggctgccaccttaagagtgtggcaagtgttggctttgctcatgggcaaccactcctcacacactgattggtgggcaaaccttattccgatgccatgtgctagaatcatcttttgttccgtctcaagtcatgcctcctctttgcttcctggctgatgactgcatgttgctaattaaactcaacctcacacatgtacattttctaatgatgtggtacaagtatgcaccgcccaatgctccaagaaacttaaccacctactgctgctgacggacacaagcttaattgcttcctacagatgcttctccactggtgcattaacttaagtagttaactaaaagttctccagctccatcagtttgcatcttcatccaacgaaatggacgtcgccacggtaacaaccaacaagtattgggcaaaagttaattctcactgtcctgtgagagatagggaaaagaggaaaactgagaatgagcaaagagaataacaaaatactccaatgccttgtactagctactagctctttggaaaaaaaaaatccaatgccttaataggccattggtttctgaaaatagttagtattattttggtttatttccactgttgctattaaaaatcatttataatactgtcgtttgattagtcaacattaatgtaaagctaaaaaaagctaatggccaaagctatatttcaaagaccacgaaaaatcgagaacatcaaatagaaaaaatagggagggagtaatagctaagtattatcttacataaagcaaggagaccggaaccttcaggttgctcacagccagtagtaattctccgttcagtacaactcttatccaacagtataggaaaatagattccacgaaaaagaaatgtgggtccctgataatgacttgtaatgaatgtcagataatatccgaaataaccagaccttagataatataatccctaacctttctttgccattctttttggaataataagtctggagtctgggatttggttgaatcgaccatataataataacacagtggtgcatatacagctttagcgaagataaaaaatgacctgatcccaaaagtgcatccacagattctccaagattcacacagcagtatcttatgatggagatcaaattcagattatcaccagagttaacatgcttgccgaacttgcaaggttatagttagttcggtgaccggccaaactataatgcgtctctggcaagttggccatcactcactctctttgtagctcactgctcagctgatgaacactttttgctcgcaccactgataagtaatgaagacatcaccttcatggccaatactttctgctgcaacccaagtgatgcttccaaaattagcaactttggtagctacagagtccctgtttatcgcacgcttatcagctatcacattatgctcacatttacaaatctgccactgagagtatgtactgccgtactggcacttagtttgctagctgcaaaatgcaaattgaagaaaaaactgtatctgtgaattttctttctggtaagagagtcgataccatcatgacccacccctctaagaactaacatatcagaaatgcatccctggtttcaattcaacagaaggtcatcttctaggtgcacagttgccgttctagaccattctattgccctgcaaccttttcactcatctactcatagctatcaacatatatactataaagacatcggtgtcttgaggcagaaattagaatatccacaaaggatatctaaccattttgctagccacaaaaaacacacggtgtcacatgtccacacataatcagctgagcgactagtgtcactacagagtgaagtggctctctctcctctcactccctgccactagggagctgataagtggcaaaagtagtaagtggtactagtagcagtagcaggtgtggcaccagagcagcaggagtacacgctgagggtagcaagggacaacaacaggtagcaccaatccaagcagtagtggctgtagtgaaatttggacactgtacgagcatcagcttgtggaagcgaaggaaagaaagccttttttcaggagaggctgggattgaggcatatgaatggtaccgtattcggtgtgacactagaaccagagcgttccctgagtgcgacgctgcaaccaatctcctgcactcactcaagcaacttttttgcaaggccagctgatctgcttggtccctgtgttgtgtgcatgtgaagtgtcaaagtgtgaatcagtggaatccatcttgtgcactaggtcatcacttcacttcacttcacttaacttgtggcctcataccggtctcgtgaccaccaccatccctctcctttttacaaccatccttctgcttaatttacacctgtattgtaggtaaaatcatattgtatttatttcatctctcaaagagatgatgtatttatttcaagtaagtaaacaagaaagaaggaaatatatgtgtgagcttcctaatttctacataatacgcaagcctcacccactataagccgttgcttgtctataaaaatatataaacggataagtctgggactgggatggtttggtctagtctgcctacttgtgtagtagaggattgtgctcttcaacgcaacttgctgtaccatcaactttagatatatgcctttggcttgggatggatgtgtcgtgttgagttgagttgagtggtgctgctcctctcgtcaatctgtggccgctctcaccttggcttactactactttatagtcatttcatatttttcatcctgggtactgcaggtgttttttcagaatcaatagcctctaatctgcacaacaagtttcatatactcctctgtgaatatgtcaaatgacgtctaaggtgctttcagcatctttggtcaaaatcctagggtgaagaaaggggtaatcagaagtattaattgatcaccatcttttcttccccccatttttaagataagatcacaagtccaatcatactagtagtatacgtttttgtgtgtgtgtgtgtgtgtgagagagagagagagagggagagagagagcataacgaaacttggatgcatgggcctcaaagggggaaaagagcaggcccagatttaaaagccactgtcaagaactaagcccagctcagctcgtcgatcagaagctttacaacctagaagcttttctacaggcaatcagcgatctgcatgtacggatataccctagaactagtcaactagaatgggagggaccaaggggttttgtggttcacaagtcagttactcttatctggttttaacaattatttgtgtggggtctatgtagtctgggcacaattggcattttcgcatgggcttcatctggcaagataaagaccaggtggaaacagcagagtgaacaaatattaacccacataaaaatctaaatgtcatcgaatagagcatgctgtggatcaaacatggccaaatacatggaaagctttggatgactgaatgcacagaacagatagaagtaaacatacctcctttttccttggcttggtaaatgttttgtgcaataacctgataggcacaaacaatatcaatgaagttaacttctgtgttcatatgaacttgcagcagtacatgcacaaaaattggtttgatcaccatctttaatatctcattgcttaagcagtgacctggaaaagtatcactccccctcagtatactgaccttgtattggccataaagaagtgaataaaattgctgaagtccgttcagccaattcatttttggtccattcaaatacaaagacatgaactggaaaatttcatattgttgcaacaaatctgaaatatttcagccaagatccaaattacatggtatggtgttaggatgataacttatcctctgcttttactatggcaatgtaggcacacatatgcacagaaaatacaaaatcgcttctttgtagcaaagtgttgcgaaaaaacattttaactttgaataactgtacccctgagtatcaatgtttgttatgtggaaaaacattgcaactaaatatttcataaaatatatttggttttgtttttcctggactcaacattcatgatacaccacactaccacctaattcaacacaaaacaaatgtgtaagaaccaaacagataatccacttatagctggttcattttgtaggcaaagaaactaatatagagtaacagacaagataagttgtcatatttcccttttttttctttccattcagttcagataacagtgaaaccatatgacaccaaaaatggggttggttggattagatattacacaaaaacatgactacctgaagagttcagctgttatcaggactccaccagtcccactgataatcctgtggtccaggccaggcaacacaagtatgcaaaggtctccactgcaggatcatgaaccatcttcactatcaccaattatgatccagctaggcataggatttcaaagcaactctgaaatgcaatggcaaaacataaaggactataaggaaaattaaggttttcacaggaccacagatataaccagaccttcatggaaaaagaacagcatctagtaaagtatgacctgcaatgcaagattgaccctggatatggcaatctttgattgctaatagcagattagaagttctcaacaaaaaaatatagcaaaagttcacctagcagctgttgttatgtttaaatatgaaagggatcttcgtttcaaaaaatgtccaaaggctactcatggtgcaacaaacatcatcactttcctcatagtactagaaaattatttgcagtaaagaaaagaaatatttttgcaggtaacaactacttcatagcagaaattcaaaagacatctagaaggcccaagtgggcagaaaccagtaaagcatcatttttggcaaatagaatgcccaagtgagcataaaccagcaaggcatcatttggcaaatcaatgtgtagagttccacctccccaagaccccaacaacaaattgcataaactataagaatatttgtatttgtacctgcagcaacaattattgctaaggagttcttagtctatccaaatttagcactgatatttcaaagagcacagtattttcttttccaactggaacatcttttcctccatctgggttgtggatgcaactgtgcaagaatgtctgcagtgtaacatgtgttacacatcctttaacctcacgtacatttagtttgtagtaaatggtacttgccaccaaatcattctccaagtgatgagactgcccggccacttacatgtctagatgcactgaagcagtatatttccgtaaaatatgtattctgggatttctgctctcttgcaagatcatacctgccacatttcaaacatgccaccctatgagattactgcaacaaacttttcagagagccaaaacgcttgtcgaggattagacaatagaatcattcaatcagcactactgaccaccctgacaagataaagaaacatctatatctggtagataagagaccaaacttcgcattttaaactctgtaaaggtttttaagtaaacgttgagcttgccatgtcattcctggttttgagaatgctctgcatataaaactaagagtgcctttagatggactgaatcctttttctttcatatctttgagacattttttcacctcagttccatttcgaatccttgaccatccacttacaaggatatcataagtacaggatgtaggatgaacacctctcttttgcatatccttgaagagctctttagcttgagtcatcattcctgctttagtgaagtcacttataagagcattataagtgcttactttaggaacaaagccctttcccaccatttcacaatacaatctcattgcttcgactttgttgctttgttttccatgtcctgtagccagtatgtcataggtgagattattgggttcaagcccactcttctccatctcaatgagcacggtgcctgcttctccgatccttccaacagactcaagaccacccagaagcgtgttgaaagtagctatatttggtgaaatgttttggtgaagcatctgagcatatgtagcaaatgcattatctagatggctgctcttgcaatgaccaagaataagagcattgaatgtgattgtgtctggggcaattccactccccaacatttcttccagaacaactgtggcttttcttgtcatgccatggtaacacagaacttgcaaaagcgtattgtatacggtgatatcagcatgaagcccagcattcatcatccattcatgaatatccagaatcacatccaacctcctgctttgtgaacatgcttgcaaaacccgtcgatgagtcagagaggatggagagaatccagctgagaccatctcatttagcaaatactttgccttctccactgccccagtcccaaagagaccagcaaccagtgtgttgtatgtgatgaggttaggctttatggagctcatcttcatttcatgaaggagttttagagctttagcagtctctcctttcctgcaatgcgaaacaatcatagtgttatatgttgattgatcaggttttaatcccatatttctcatctctgtcaagaaggattttgcttccttaaacttcccaagcatgcaaaggcaattgataaacacattataaacaactgcatcgggcaacatgtttctgtccattaactcctgaccaaacttaaaagcagtaggcatgtcgcctgctttgaagagcccatctattaaagtggtatagtttacgtgatctagtgacaggccactcccactcgcatctttgaacaatgccatggcttcctctatttttccgttctgtctcaaaccattcaccagagaatcaacaatgaatttatttaccttgacaccctcacatagcatgtcatggtacacctcaagagctgcatcttgcccttggaacttgaagaaaccatcaataagtgttccgtaggtcaccacatttggattgatgcccctttccttcatcatcctcttatactcagttgctttgtcaagcaatcctcttttaacaaagccgttgatgaccgatgagaacgtaacaacatttggactgatcgatttctcctccatttccagcaacacctgctctgcctcatcgacgttgtgagctttgcagagagcgtcgatcaatacagtgtatgtaacaccattgggggagagattatctgaaagagcaaaacgaagtgtgtcctttacttcatcagtcttgccttgtttacccaaccagtccatcaaagcagtataggtgaccaaatccatgaccacgcctctagaaaccatctcccccaacaggctgagcaactccttgcccctcccagctttcgccagcgagtcaataagcgtacagtaggtgacatggtttggcgcagccccaaccttgtccatctccctgaaaagagcatacgcctccgagaagcggccatccctacaaagtccagcaacgagagcgctaagcgtgaccacatccagcagcactccattcctgaccattccctcatacaaatcgaatgcctcctcgacccctttcgtcctgcagtagtacacaatgaagggtgtgtaggtcgccacattcggatcaacccctgcctccttcatcatgtccagcacgccccgcgcagcatcaacctggccggcgcggcagaacccggcaaccaaggtattgtagcccaccacatccattggcagcccctgtgccgtcatcctgtcggccacggacaatgctgcgggcgtgtccccaaccctgcaatatccagcaatgagagtgttccagccgatgacatccaaggcgtggatccctccgcccctgtcggccagggccgccgccgcgtcgacctggccattcctgcagagcccagcgagcaaagtgttgacggtgaccccgtcgaacggcaccccgcgcttgcacatttcggcgagcaccgcgggggcatgggcatggtcggagagggcggcgagaaggatgttgtaggcgacggtggtcgggcgagaggagcggaggagcgcgatggcggggcggagcaggcggaggcggcagtgggagtagaggagggcgttgagggaggcggggtcggcggggcggaagcggatggcggcggcggcgaggccggaggtggcgagggcggggatgaggcggcggaggaggaggggggcgggaggggaggggagggaggagaggaggtgggaggcggcggagaggcggccggcgcggaggagggcgatggcgagggagcagaggaaggaggcgtggaggcggagggtttcggattcaggcgggggcgccatggccgccgccgcggaccaccactagcagcaggtcgctgatgagtagtgaattttttttcatttttaaatttttttcttttaatatttacgaaaataatctatcggcacaaaaaattacaaaaatagaccctgccgccctaatggaggggcaagctgacgtggcagacgatgtcgaaatttgcatttagccccttgccgagcggcaaggggctaaatgcatttttcgcagccctaaagagcatttggctcgtacttttttttcatctgagtcccttgccaccctactagagagcggcaagggacccaaatgcaaaaagtaccagccaaaaagtactaggcctgggctggcttttttgcatggaggccccttgccgccctaacaaaaaaaaccctccctctcccgtctgtcatcaccgcccgtccctcccccgtttaccacgtcagcttgccgctctagtggagggcgggagggtctatttttgtaattttttttttttgccgatggattatttctgtaaatattaaaagaaaaaaatttaaaaatgaaaaaaattcgatgagtagtagggcttctctctgggcttctttcgggcctgaacgcttaaagcccgaaaccaatagtgggcctttttaactctcgcggagttggccagtaacctgttgatgggctggaccttggcgctgacgagaatggcccatactgtcttcggcctagcccatagcactttcagaccaaaaaaaggaagactaggggcaaatccaaatgcccccttaattcactggtgtttctatattttcccttaccactcaaattcatgcacaaaactcaatccaggtcaatttctcttctagctttcccctgatatcccgttttcatatattttccctagttatttcagtttctagtgtcccatagacctccatcttttcgagttgaaaactggatatggcagaagtttgaagaaaatttgactcatatgagtaggggaagtagaaatgcaagtgatttctaaggggtatttggattaggtccacctgagaagcagagtagagctgaaattttgattgcccatttgttgatcagccacgatcaattcttcaattctgaaattaaattttagggttcatttcgattatattctatcgtgatcgatctatcacttttaatttttaaactaccaatagcacatgtataagagttttatccatatgttttttttatcaaacctatccaatctaaggctccatttgaacacttgtttagcttttgcagctcctcatttactgtgagtatgtttcctaatctgttaaacgacatgttctttgcaaaagctttttatatattttttaatttataatagttaatacctgatcgatcatatagtaattaatattatttctcgtttcgcatgcggaaaaaaaacaaaaactaaacgtggtttcaaacagagagcaagcagccaagcatgcacgtagcttggtggttgatcgatctgaaattgtgaatggggtacagtaataaacctgatgataaatgtggtgtgtgcttgtatctgaaaaaagtgaagaaggcccggtgacatgaaaaatgatgggacagacagaactaagatgcatgatcgatggaaatgtgaaactgatccattattattccagccgagatctatcgcatgcaattgtagaccactttatcaaattattaccgacagttagctcttcacagtcttcatgtgcatgcattgctgttcattatctaaaacaaaaatgtgcatgtcgcgttgagttgatcgatcacagtacaatatgcatgcattacgcatgcttaatttgcctgccttatgcatgcatgcgctgtttaacttttttatgatcttctttttctctgatccgtgtgctaatcgatacagtgtatgacatttgtcgtttgtaaaacgcacgtggtttatctttgtactgatctgttgggtttttatcgttttgaagagaaataaaacatagccgaatgtactcgctccgtccaactaagaggcaaaaaaaaattgaattctagtaaaaggtcccccccaaaaaaaaaagaaaagaaaagaaaaaacggtacgatgttatattatattactaccacaaagatgcaatatacagtaccggctggagtagtagtaagaaactatgggttgaactcttagtgactagtgagtcaaattttaaactctagaattgtaaatctttttcaaatggagaaagtatatgagaatgtttagataagattctaacatgttgagttgtgatccaaattcatttgcacttaataaaggccagcttctgccgtagtggagcggaggcccgtcgccgggaggcttgggcccatcccttttggggttccaccatatatatacctcttgtaagccgccgtgcggcgatgtaacctcacctcagatatagtaaagatattttactggctggcgcccgtggttttttctctcctgttttgggagggttttccacgttaaatctcgtgtcttctatgattgatctattgttttttatcgtttgttcgcttatcgtttcctaacataacatatgtatagctgctccaaataattcaacttatcgtttcgattcaaagaagttaattgtagagttttaaaaaataaagtaaaagttaaaagctaattttctattaaatgcttatcaaaatataattaaagttttcccgaactgaccgtatattagccacggacaacatggcagccgacaaactattattaatgtgatcattgcatatatatatatatatatatatatatatatatatatatatatatatatttcaaaataattaatctcaatgttatattaaaagaaaagtaaagggaaagggaaaggggcaatataatagaggcggtcaagctaattaaggtcggtagggaggaccaagttaagtgatgatcaccacgtgtcaacgctgaccgcgtccatgtcaaaatcatccgctcaccactagtagaaccactagtagtggatcgatcgcttcattcagatagccagccgcccaggccaagttccactttaatttcatccgtttttagtcatgcatggccatggaaaatatatagcttgcgtactccctttaatttgttacgtggaatatatatatatacctactagagaaatatgacacatcacaatttaaacatgttagtacacacatcacagtactataaatttaaacattgtagtacgagatatgatatatcctaataatataaatctaaacatacatcttgaatatgtatttctaagatgtatcacatatcatacgtattaggtttatttttatgggatagagggagtatacatattagaatacgtacgtggattatattatatgatggggaagattgattttttttttaacttttgtgttggacgttttaaaaaagaagagtagttttattgggatcatcagccacgtttgttttaaatactgactcaaaacaatatctttctgaaggcctgtttagttccccaaaattttttctcaaaaacatcacatcaaatctttggatacatgcatgaagcattaaatatagataaaaagaaaaactaactgcacagttatggggaaaatcgcgagacgaatcttttaagcctaattagtccgtgattagccataagtgctacagtaacccacatatgctaatgacggcttaattagtctcaaaagattcgtctcgcggtttccaggcgagtactaaaattagttttttcactcgtatccgaaaaccccttccaacatccggtcaaacatccgatgtgacacccaaacattttcatttcctcacctaaacacaccctgattatacctcctgaggaggaccatatatgcggccatagaataatttatatagagtacttccaagcactttgtcattttgctactagctaactaaaatatactatactcccatattttgggcacgcgacccatatgcatgcacacgagtgcatacaattctgtgttttatttaacttttggtcaactagccgcaactccataaattcggtctgaaatagtagcgcgtatatatgatcgtcttcaacatacaatatataattaccccaaaaagattgatctataccaaaagattgaaaaaaaaaacactagaagctgatatctgtgacgagcgcaagcatggccgttagggtgacacgagtgatcgatcgatcgagtcatcgagagactgagcatgcacgcatgggaaatgtttaatttaaactgtatagtaggcagctcaaaaaatccataaaaattaaaaaaaatacagaaaaaaatacatatgcaggctattcgtactaggattgttggacttgagttgccggccaagttttggaggcgccgcaaatctcagaagtatgaattgaaagctgctgcctaccaggctacacagttcttgcgctgcctctttcacatgagctatcttaattaattattcgtcgctacagtctctgcctccaatttcatctagaagtacgttgctgtcctaattaacatatactgtacgtatataattatatgtgcaatactactccgtccacgattgactagtactgattgacatcatgaaaaagatcatttgtgtcatatgttaatatgcatcatgcccccttcaattcaacaccatatcatcttaatgactttctcggatttaatgcatgacactccattcttccacacaagattggctacatgggcatcgagaaatgtaaatattaatgaatcgcttatttacgaggaatgactattagtatgtttaaatagttgataagtagaattacttatccttggtctgtgtgccaagataaaatatgactatcaaaaatagatggaaggagtatatatcataatgatgagaaatctcgatcggtacaaaacggggaacacatgcatggagatatatctagaccaacaagtacgtacagaaataaacttctgtcgaggatgtacttgaacatgaatgtttgcttgatattgttatttagctatattttagaatactttacaaatggagggatgaattgcaagtacaccctctaatttaaattagattaaattaaacacatggtgaaataggaatagttaggaagctaggcagccgtaaattaacctaaaatgtacatattgatagaagcaaggcatagtcatttatgcgtaaaggtaggcaccgacgactacagtagacgaaattttgggggtggacggagagttaattatttttccgttatatatttggtacatatataggtaattaattatgtggcggtttatataaataaataaataaataaagggagatgcatgcagtatgaaataggcaaagggaggcgaggagaaatacggcatgcatgttgaccggaaggcatacacatacatatgcagaaaaaggaaggacggaaaagaaaagatgcatggcggaaagggaaaggcccgacgaatgggaggaatcatatattccatcgattagagcaagtttaatagtaagttcaatatcaactatcgaatcaacatatataagtacagtagttgtaaggttatttttaatttttcttctcctctctttttctctcactaatgtatttatattagagcagctaataattaattgttgttgcatgagagccaacacgtacgttttcttttatatattttttcttttacataataagtttatagtgtgcttatactacctcattgtattatgtttgctcttaattaaggcattaattaaggtggacggagaatcggaatggattgatgcgatgcctccactgggggaacctccctcttctctggatgcttttgctgtgccggcgccgcgtggttcttcgtttcgtttgtctcgccatctcttaattccttacgttgaccattatttaagcctcaaaatcatctgtagcttagcttgttcaaggaggccgcgtcccgcgtgcgtgcgtctgtcgcggtcgcggtcgatgccatgctatgctagcatcacctgtcaagcacgcacgcatgcagttgatccagtcaaaccccacaatctcctcaggcctcagctctccatccatctatatatacattaacaccacaacaccccttcccgctcataccatccatccaaccatcgatcgatcacttccaacttattttctttaagagaaacaacaagcttaagctagctagttagtcatcttgttaattttggcctcaaataggtctagaattcatcaagaacacgagctagctagctgcactgtctcgctatatatatatatacactgctcatatggagctagtggtgcaggctttggcggccgcagctgccctcctcgccgtcttcttcctctccaccttatacctctcgccggcggccaccgcgcgccgcctccgcaacgccggcttccgcggcccgaccccttccttcccgcttgggaacctccgcgagatcgcctcctcgctcgcctccaacaacgacaccgacgaatccaacaccaagggcggcgacatccacgccgccgtgttcccctacttcgcgcggtggcggcgggcgttcggcaaggtgttcgtctactggctcggcacggagccgttcctgtacgtcgccgaccctgagttcctcaaggccgccaccgccggcgccctcggcaagctctggggcaagcccgacgtgttccgccgcgaccgcatgcccatgttcgggaggggcctcgtcatggcggagggcgacgagtgggctcgccaccgccacatcatcgccccggccttctccgccaccaacctcaacgacatgatcggcgtgatggaggagacgacggcgaagatgctgggcgagtggggcgacatggtggcgtcggggcggagctgcgtcgacgtcgagaagggcgtggtccggaacgccgccgagatcatcgccagggccagcttcggcatctccgccgacgacgacgacgccaccggcgccagggtgttccacaagctgcaggccatgcaggcgattctgttccgctccacccgcctcgtcggcgtgccgctcgccggcctcctccacatccgcgccacctacgaggcgtggaagctggggcgggagatcgacgcgctcctgctcgacatcatcgagtcgcggcggcgccgagaaggcggcggcggcgggaagaagaagaagaagacgacgtcgaacgacctgctgtcgctgctgctggccgggagcgaggcgagcgcgggggcggagaggaagctgacgacgcgggagctggtggacgagtgcaagacgttcttcttcggcgggcacgagacgacggcgctggcgctgtcgtggacgctgctgatgctggcggcgcacccggagtggcaggcggcggtgcgggaggaggtggtggaggtggccggccggtctggccccctcgacgcggcggcgctggggaaactcaccaagatggggtgcgtgctgagcgaggtgctccggctgtacccgccgtcgccgaacgtgcagaggcaggcgctgcaggacgtcgtggtggtcgccggcgacggcgagaagaaggtggtgatcccgaaggggacgaacatgtggatcgacgtggtggcgatgcaccgggacggcgagctgtggggggaggaggcgagcgagttcaggccggagaggttcatgagggagggggtgcagggagggtgccggcaccggatggggtacgtgccgttcggtttcggggggaggatctgcgtggggcgaaacctgacggcgatggagctccgggtggtgctggccatggtgctccgccgcttcgccgtcgaggtggcgccggagtaccgccacgcgcccaggatcatgctctccctccgtccatcccatggcatccaactccgcctcacccccctatgctagctaattaatcatattattcatagttaatcactcaattatgttttgtttgtgcatgcatgcatgcaaaggcaaagcaatgcatctgcatgcgtgcgtgcgtacgtacgtatactggtgaccagtatacatgtagtcgtatatacactaataccatgcatgaattaatactagctaaagcttgatgctttaagctttaagctgagctgtgtcatatgaatgaataattgaattgaatcgatctgccggatggttattaacttattactgctctctctgtttcatatttgacttttttttctaaattcaaattgaactaagtttatccaaaaacaaagtaattaatgttttgaatgccgaacaaatatattatcaaaatatatttattgttaaatttaatgaaattaatttaatgttataagagttgttatattttttctataaactcagttaaacacttacagaagtttgattttttttaaaaaaaatcagagtatcttacgatataaaagggatggagtactatgtccatgtttaaatatatttacgacgctgctaattttatatatgtggtttctatgtgcagctttgacaataattttctctaataaattactaaagtatcaactgtggatcggaagtaattataaaagaagaatcacctatatgatttttatgtttcaaatttgaatatatattttaagaactattgatagtcaaaatttaaagagtttgattaaataaaaattatcattgtgtgcataatacgtaataggtgcaaaaatgcatgtgtgtacgcagaacggccgatgatacatatctcaatcgatatggcacatggtcatatatatgtatacatggccacgacgacattcataaattaatatatacacgtgtggttatagtaactaattaacttggtgcttagcagctagcacgcactataactagctattagctagctgatgtacgtacatctcgatccataaactatgcgtgtttgcattttggtattacgtgttaatttggcggtgttggtgcgttagtaaccaccacaaatttgaccatgaacaggctgcccaaaaacggaaagaaaattcgatccgtactacgtacggtccaaacgaaacgggacttatatattgtgaatgctagctggctacctgggcgatcgatgacttcatcagtaatgaagtactagtactactcctacatactaatacattactaaccacttcttctgatttttaatgttttgactttagttgaatttaattcagacatatgtttgtcatatcacaacaaaataaaaatgttcaaatgcatattaaaaaaaacaacggagtcaaaccggagaaaagataaatatatagtctaatgtatattcaaaaatcaacggagttgagcatcagtacaactggatggagtatcttaagctagtggtgtttagttttcttcattgttttcttatgccgctgcttcctagtaacttcaaaaatcaactaatctgttccacgcgtgcctatgcatgccatctcaagaattagctaatgtcaaattagtctttgatcaagcagagagatgcatgactggctgagtgagcaagcatgctggttggacgtacgcatgttgttgcctagacttctggaaatgattcttggatgcatgataattaagagaaactttaagttgaaaaggtacttttattattccaaaaaaaaggtacttttaagtagaagaggttaactttcatagcaacttgcagctgcgtgtggtgtggatgccgggtcaaatgtacgttcatctaactagctacatacccggcttgcttccgtgttagaaagaaaacggatggatgtccacccgggagattagaatctatcttcaacgaataatgtagaaatgtcatccaaacaaaaaaaattccacctcatctgttcttgttgagaatggttatatgtactgtgctggagttttaaaactgttagatcatctgaactttcattccatctctattttgtttctggaggaaaaatggtggcttgaaaaaaaatgaaacggaatttttgaaatatgttatcatcatctcaattagatgaggtaaaaaaaatgggatgaggtggagggaaaaaaatgtataaatagagtgaaacaaaattaaaaaaagagaagagaaaaacaaatgtaaaaatagattgagataagaaaattgaaaaatagatgaggtaaaaatgtaaaaaatatattgaaataaaaaaatttagattgaaacaaaattaaaaaaagggaagggcccatccgggttcgaaccggagacctattgatctgcagtcaattgctctaccactgagctatggacccttgtatggtcagttgttggatagtaactacatatttaaggaaaaatggggccagccacatcagacacaagtgtggtggttggtgtggacgcctcgccgccgttgtgcaagagagtacggccgccgcatcttttccttccatctttctggtgttctccacacagctagtgtcatattatcattttatttcgcatgcagctgctcattttagtactagagccgagtttagatcaaactttcaaacttccaacttttctatcacattaaaattttcctgcacatacaaacttctaacttttccgtcatatcgtttcaattttaactaaactttcaattttgacgttaactaaacacaccctaggaaacgactctcaccatcctatccccttctgccagctgaaaagagagaaggaagaacacaaactaagctaactacccaatccatcctaagacgtaaacatttaaaatatgtgacattgtatagcgagaggttataattgattaagaagagaaaatagatagaaaaatcaaataggggatagttgtgagttgtaactagttcagatgaaagggataggttaagaaataccttacattttagagaaaaaaaagtttcaaaaataactatattttggaatggaaagaatagtttacaccatgcaccaatcatgcatctgctaaaggaacttgcggcctcatcttttcacttatacttatgcttatcagtcaaaatttgaaatttcaatcttaaattttaagttgattttaaggttttttcatcgaagtttatttttcagcctttgcttttacatagataagagtacgtatataaaatttttgttcactttttttttttgtaaatataccgtttcgcgatgggtctgatgatatatccaaagtatgtatagcctatatccaatccaacacgaggtcggtcggtcggtcggtccggtggtcacatagtgcggcaccggcagcagcattacaatctctctcgtgtctcgtgcatccagttgacaaacgcaagaacaggccagccaaactaattgactctttatcacctctatctttcactgtttacttgtaatagaatgtacttgaacttgacattgccgtcctcccttgtgtttagttagtacagaggaggcatagatagatagcattggcttgacagactgcgattgatgtgtgtccattattcttcatttcttctaccttgacaactgcttgacagttgacaaaacattgctccttgctccttgcttccatttgtcggatgatcagatcactgcatcccatggttttcaacccaaccaccgtgttcctttctttcggagcccacaggaacaagcaacctccctgcttctcttcagatgcattccttttgtcttctaaccaacacgagctccagtacctaagatatactccgtcccaaaaaaaaaaaaaaagtcaaaccctaggtatgaatctggacatgatatccagggtttgccttttttttggaacggaggaagtagtatataactagtactctctcgattttgcttgcaatgtttgactattcgtcttatttaaattttttttacaaatatacaaaacaaaaagttgttcttaaaatactttggataataaagtaaaccacaaagaaaataaataataattctaaaattttttgaataagacgaatggtcaaacagtgcaaccaaaaactcaaaatcccaggagtacatagtacaatgttttccatgataaagatgcatcatggctaaacaagtccataaacgccactgcaataccatgggctattcacctttcttttattttcttgagttgatgagctcactcaagtctgaactgatactacttttatagcatcttaaaaagctaaacttaagcagtgtagtagtgcaaattaaatggacgatcttcaggtaccaactcaataataaatccccaggttcttttttcttcctctatataatataatagggtacgatccggatccttcattctcatacaacaccgcagatgcagatgcagcagattcacagtacaccaccataacattcatattctaatacttagtatgtagaggagttcctaacatagcactgacatatacctcagcatccagcaacatcatttctcaaacaactctcttcctcttacacctacagcaagttagcgcatcgcgttgcattgcatgctaccaagcgcactcacggggattcggggaattccgtcagtcagagatagatatataggtggtgctccttccttccagcaataatacacattactcgcgaatagagttgatgtcgatgtttggagttcttgagtccatctgcctcatcaacccagccgaccatccacccatcgtatgatgcggcatgttgtgatctggcagtgccattgtgggggtctcctcctcaccgccaattggctcttcgttattctccgtctcttgctcagctttcgctttatttttctttgtcccaccatacatgaagctccccactatcacctatttcaaccaaaaaaaatataaaacaaaatgcgtaagaaccaaaccaaacagatatacacagaaaacagtgcataacctactcataactggttggttactttgatgggcaaaaaagctgatacagggtaacagacaagataagctgccatgtaccccttttattcagttcagataacagccaaaccatatgacaccaaaagaccgagattggttggataacatagcatatacaaacatgactacctgaacagttccagctgctgtcaggactccacctacactcccaccaataaccctgtggtcagggccacacagagctatgcagaggcctccactccgggttcgcgaaccaccttcctctatcaccaaatatgatccagacaggcacaggatttcaaatcgaccctgccaaaccaatggtaaacataagggcctataaagaattaagctaggcacaacaagacctacattgtaaactatgacctacattgcaagtttgaccatggatatggcaatctttgactgctaaaagaagttctctacaaagataactatggagcaaaagttcatctaaaagcagcatcaaagccttttactcaattgaggaactatggaaaatccaaaatgaatggagacaagttgattaccatttctaatgcagctcagcacatgcaataagtatgggtcaaaaagagggataagaggtttagtttaccattctgagtcaaaagcaggataaaggatcttttgctatacccaagagtgaaacatgaggacaaaagcatgaatatggaagtcccggctacaataatactaagaatcaaacaggcctacaagcagcgtacctcatatgtaaccacaccaccagagtttgaatcctgatgaagggttgctgtggatacagctcctgtcgctgagatgatgcacactgcccttgggccctgttgtgagaaggacattatcctggcagcaacatcctgcatgggataggaaagctatactcacagaacaacaaggcatatataacaacatgaaaaactgtttttcatttccagagactaacaaaaaagatcagatccactgtagttttggatcttaattagtttttttttttagaactcatgttaattagttggcatccatcagttatcaggcaaagaattgtagttcttgcataggactactatgagttaagaccactgactccaaaagatgaatcatcaacagctaaaaagtacacctttgtaggtttgcacaacacacagatgctagtgcagcctgagactaccaaatgatacttaactgtatatcccaactaccagttgtatactgatgggggaagccactacatgccaatgatagtgaagtgatttttttaatcaatagacaagagtttggtacatgtagcaggttaatgaagcatcatttattcaacaacgtcatcagtattagttattacaactgaaattattggaaatgtgttgcactcgcaatccaaaaaatagttttgacgacaatttgaggtactacattcaagctatcacgactcacataatcagaaaatcgttgcgttgaataataacagaaagttcaacaaaggttacaacagcatgattcttagctattagtatcctttgtataacttaacttacctctcctggtgaaataataatcacatgaggagtaaaacctgttccaacagaaccaagaaaccattttcctgaagaacacattacagcattttattagatagcaggaacacaaaaaaacccatttcacgcataaaagaaaagaagaggaacaaaagctagccatgcatagtcaatagaagtttctgatgttgattcaagtagtaaatcagattttaggagtacatatactagtattatcagtacacataccccaccaagttcccaacaacaccataatgagcgggcattgtgtttgcatgataacagccgtggcctccaaagacaatagtaggtaaaaaacaaccaactaagctggacaggataccattttcacatctgatccagatacccaatagcatatctaagcttaagttcatgatataagcaaggaaatacgtaacataaaaaggtggtcagaatgtttgcagatctaacaagcaatactatcgtgcaaaatgtaaggtagcatggaatcaagaagttgacaaaattcattcaacaatcggaaatcatctaccactagtttcttagtgcatttctgttaccatattaaactacccttgcattcgatcaatcattaccatataaacatacaacatgatcatgaaatttgctaggttgcaggatctcaccaagagaagccaactgctgcatctttccagacccaggtggccgccctcggccacgcttctctgtaagggcaccagaccccgaaccccccgatcctgcccccgacccaaaccctgagcctggtgtggtcaccattgtacccatcgccgaggtcgacgagtgaggcgtcgacgaagacggcgagagccccagcgtgaccgccccatcaggcttatacttcctcggcctcccccgcttcttcttcaccggctcatcctggccagcaccactcccctgatcccctttagcatccgcgctcatttcgacacccatgccaatgtccataccaccaccaccgccaccactgccgtgctgcgcgacaggggctgaggcatcaacatggtggtaaccctgcccaatgtgggaacccccaatgtgagggggctggaaagggtaccccgcagagactgcatcaagatgctgccgatatccaccgggcggcgggccgtggagcccggccgggtgcccggagcctcccggcacgccaatgccccggtgctgcacatagaaggaggagaagttggagcctgacgccactgtggactccctcccatccattcatggaatgggaagctgcgccacagaggaggaaggaggaggaactcacgcggccacccacaaccacaagcacaaccaaggtggcaactttccttcactattcgagattagattcctccgaaagctatcggaggcgaagcaaatggacgcaagaatatcaatctcggagagagatctcttctccaccgactcccgaacacaaaaaccgcagtttgtttgttttgttttttttctctcctcgagaaacgaggcgagatcagatcgagcagcgacgggagatctcgactctgaacaaggcggtgaaatctccaggcagcaaaagattggaaccaaacgcgagaaagagacgggcagaaaaaaaaacccgatctttcgcagggaaagaaggggcgaaaaggatgggatttgcgcgaggtcgagaagggatggatacacagagagatagagtctgcggcggcggaggcggcgacggcgggcggcggcgggatccgagaggcggtggaggggggagaggagtgatccaatcgaaatggcgatggatgggggaaatgggagatagctaaaaccctagcggagggggatcacaggagagaggagcccaagagaagagaagagaagagaggagaggagggagagagagagagagcaagcatgtatggtgaatgtctctatgtgttggaggagagagagtgttgtgtgtttgtgtgtgagggattctttgtggagccaatatggcagatctcatcaatgcaagtgatatgctgccttgtcctaggagtgtcctgaaatgatttgttgagtatcgtagtttggtcgaagagggctacgttagatatatgtatgtatattggatatggtgttcattaaattaggtggaatcggacaaaagttttattggccaagaaaatagtggatatcgtatttgtcggtttatgttattacgttgttttgtcctatcgtacggttagttcgaatcaatgtcaaaataaataatcacttgttcggtctccgttttttatgcaacgttaaggtagcgacaaaaacatcattaaaaccttccaagttgagattctctaagactcggagattgatgcctattgatttggtaagacagaggcaatgatatagtgattctttctattaagagcatcggctacaacattagctttatcagagcgatactggatacccaaattttagtctttgatgagccgttactttttttggcttggttttatgtttggttggttgataaaatatttcaaactttttatggctgatatggacttcacacttgttacgatcaaaagtgttagagcatgaactatggttgtcagctccaagtcatatgttggataattggctttatgtgatcgtaattgatgtgaagtataagcaaccgctttgctatcttacatcaacccacatacaatctcatggcgagatgcataaactcaaaattcatatattaacgggtatttcaagtgttacgagactttgtttttttaaaaaatgtcttataggatcaccaatggtagaatctcgtcaagttgccatctagaaatggaaagtgaaacaatatttgagtcgcaacaatcctctagcaagcttagttttagagtaccattaataccgattttatcaattttctcagatttaatgtaatgtctatgctcatattgcattatattccattgaaagtggttaaaatgaaatatgagaaagaaaaaaggtatcagtgcaaaattgtttctcactttttttagtacagtggatccgtggatgtgacggtctatgcaagagtagtgtgacgaaatatctgccacaaaggatcatggccttgaccgggtaaggagaaagagaccgagctctgctgacgcgtcagctaagtcgataataattgggtcgataaccccggtgtataggtgagcaatgccattatcatcgagagagtatttgcttacatttgttcaacaacacctgttcaatccagattttgatttgggacagtgaaaaatgctcaaactaaggaccgaaaatacaatcaaagatctttttctttttctgaaaaaagtggctacaattaaacagacagagcggtcggatatgatgaaatcgtcaatttctaagtatttggatttttctctgttttcttgggacggatccaaaagttttatttctcccaagaactgatcacgtcaccataacgttctcttgtgtacttgagagttcacaggggcaccaataattccaatggagtacagcttgatgctgtacatgtgccagggcagtttggacatcttgtcactacttccaagatttattttgtactagacaaatagcaacaagacgaagcactatatgttagtataatgctggagtaccaaacaagtctagcaaagtttttatctgtcctaattatacaaaggactgtctattccaacctgaaaacattcaataacatctaaaaaaactggtgaaaagttcttgtgtagagcaccatttgtcaacgatgatttgctggtcagacaagttgcataattgtcgagcaacaccaacaaaaggattcacacatgtgccaagtttgctgcagatgtagttgtttcatccaaatagcatgaaatagcaaaaaatctacttccaaatgcaacgatctcactttaatattttaaaagtgttcgagatgttaattccaggctctgccactacaaaggtactctacaaaccaacgtatagaaaagagtaacaagctccaactgagtagactgccaaggctagatggaatatggtcacttgaccagagcaaatgcactcatctgagcatagaacttgttctcttccatcaaaactatatcaacactggagcacagtttagcaatggaacacagattgtaggaagtaaaactccccagttacttgtcgacctccattgcttgcgcagctttggcttttgttaaggctgaaagttttgtcttcacctttttcttgccaaccttaaatttgccacccttccttttcacatcaccatctatctgaataaaaatgaaaagaaagcattaagaaggatgctgcaaacttttcttaaccacaaaaaaaaagaagaatgtagcagtttgctatgttcatatttatattcaagtaaaaacacaagaccaatcaacaggaagtgaaatttgaggagccagattgatcaaattattttttgagaaagcagtagggaatgtaatctcaaacaaggcctatataactgactgacccaaagtaaattatgagcagattaaacaagctctcgaagacaagcatatcctcatctaagattgtcatgtagttcaagcactatttctctagagtacttaaactggtgtgagcaaccaggtcacagcatatcagatggcaaatatatatattgtataccgaagatcatcaggaggtttaacgaataaaagagtcaacacctggtgcaaaaacaaaaggaacttgacaacacatgtttggaattgctaataggtaaacttcagaatatacgagtagatcgatgggaaataaaacccaagaagtacaaacagatcatataattggatagaactcatgagcaatcagcttgctcaaatacactctcaaacacaccacctacatttcactagcactaataactgtttgtgatagtaaaaaccagcggcttggaagcaattgagggtttgaagccataaaacagtaaaagactgaagctagtccataacctaaacagctgcatttaatttcagaaactgcctaatgagtaaaccagtgaggcataacaggactcctggaactgcttgggatctgtgagctcttgagatgtcttggaaaagaaagtggcacatgggaaatgaaatcgctcccagagcctcatgagaacgaactacactaaccatttcacatgcctcctgttatgtttctaaagggaagcaagcagggttacaccggtgttgagatttttggatacctgtgcctaacatccaattttgtggattcactgtaaactgacatatccttttctgtcacccctacaaaacaggctgatgacagcactgaacaaattgaaaagtatatgtggactaaagattcctgtaggtgctgtacaaacctcagtgggacagaagacagaaaaatcagacccagtctgtaataaatctttcaactagactcttattcagaattcaaatttcaaagtcctagcttacatcttccctaactctctgataattagcgaatgctggtcctggctatgcaatacagtggttagtttccacaagagcggtcaataggtcgtgtgaattatagcagagatacaactccaacaagcttatagccaccaacaataaggtaaaactagtttttggaaactaaactgcatgacatagcatactcaaacacgcatgctaatttaacagatgaagaccatccagtgttaccaatcaggagctgatcatactaactcagcaagagaggaactacacaacaaatgattcatccatagacagaaaaggagatgtagaagaggttgatagtaccttcatcttggatttcttggcctgcagcttcttggccagtttctccttcgcctccttttcccctgcacacacacacatacaagacagccaccataatcccaaatcagatgcctggttggtgaaatctacaaggagatgagaggaaaatcgacaagggagcagccggatgtatgatctatcggtggtactttggaggtcgaactcgtgctgcttcttccgcttggcgaggttgttcttcttcgacatcttcctcgccgccaaccgccgacgaagcacagcacagcacgcagcaacgaacaaaccctagccgcggcagagcctccatggagatgggagtccttttaactgggctggaattgggcctccactaattcggtcaaggcccaaactgtcgtaaagcaaagcccatcaaaggcccagttaaacagtcattagacctaacccggtgattagtggtcaaagctgtccgtcattacgagacggagacagtgacgtgaggggacacgtggctcgggccgaccactccgatcaatcatgccggacacgtggcgcgtggccaggtgccagcgtgtcattgcgcggccgcatcatttcgtttttaaatatatgttttggaacgaaatcattcgatttttaagcaccacctcacctcattacccgcgctttccgcccggcaattacaccaagaaaaggagcaaaaggaaaaaaaaagtctctttatcggaggcgtaacatctacttctgctgctgctggtaaatacactcttctctgagcttcctcaagcttctgaaaacagcaagagattaaattatcgtaattttaagcatccaaggtgtttggtgccagtgctcgaggactggagatggagacccaggaggcgaagagagcagatgtggcggcggcgccggcgacggcgaccggcggtgaggccgtcaaaccggccgccggcgatgctggcgcagtaaccaagacgagtaagattagtttcttcagcttagctttctctctttttttgctccaagtttcagtcctgcagcaactgtgacccattttgtagtgtttcagactgaagaaaatcttgtttagagttcattggtctgagaaaattgccatcagagttagtagttggaattagagtagttacttgctgcctttggtgctaatccttatagatgcagcagatggaccttcagcaccagcaggcaaagctgcaactccaacgggttcggttgacagaggtactacgtgcataattattcttcaagtttcagtcaagaaattgcaatctatggagtaaatggcagcaacaaatgaaattaacttgcagacgccatactcgcaaacgtggagctggagaggaaactgtcaatgatcaaggcgtgggaggagagcgagaagagcaaagcggagaacaagtaagataagatagcctgaactcaatcaagcactgtaataaattgcattcttgtcaatcctgtaaattatcatcgtgtcacatactcataaaaaatggcatgtttatcagggctcagaagaagatgtcatccatactctcatgggagaacacgaggaaggcagctatagaagcaaaactgcgaacacaagaggtctgaatcttcatatatctcttcttgtcaaagagatagtagttcatagttgcagcaatggctgtggcttcctgaactgactgactgactgacaatgtattccatgaattgcaggagaagctggagaggaagaaggcggagtacgcggagaagatgaggaaccaggtagcggcgatccacaaggcggcggaggagaagagggcgacggtggaggcgacgcggcacgaggagataatcaagtatgaggagatggccgccaagcacaggtccaaggggactacacccaccaaattcctctcttgtttcggctcctagaaccacaaaaaacgctcctgcagtgcagtctcctgtcctgtgtgctgatgcttctgtgtgttgatatggtgatcagtttgcagttttgggcttgtttctcttctttaatcttctgtgttgaagttccggatttcatggctctgtcatgctgctgctgtgttttccttttcgctgaagatgtgatcatcatgtttggtgagtgtaagcatactcaaaacacttgtaaacagtcagtcacatgtaaacataccaccttttttgtgaattttgcgcttccagagattaagaaaaaaagcgtgccaatttgttttgttggtgctttgtatcatgtatgtgcatatttgtattccatgacatgcaagcaacatgacaacatgtacttgttgaactcaagtacgggtaagtaacagttaggcacttgacagcagcagcaagtgtttgctgatgtgggaagcaaacatggaaggaccaaccaattactaatagtgaatgatttggaataagcactgcaatttgcaggtacaactgtaacaacaagtgcattcttgagttttcaacaagatgagcaatggaaatgaaagaaaaacaagcaacatcagaagcgctgcacaacagcgagttgttcttcatgcagttcattactgaagcagaatctcttatatacagctgagcaaaatttcctagaaccaaccaactactgatcatcaaaattcaagtagcacattcaccaactcttgcacctgattctatatatgtactatgtatctactgagaataaacactagcacggcattaagccactaactatataaaaaggcatgtaatgtaaatatgtaagagctggactagttgttgatgcatgatgttaaatcttgttggcttgcagcactaatcactttccaggtaggtagctaactacatcaaccaacagtgaagtaaatcatccctatactgatcggtgaagtgatggtagtgaaggattttggtttgcaagtgcagcgaatcggcgagcgacggctgctcaggtagggggcagcgcgtcgtagaggtcgttgccgcggcgggagacgagggcgacggcgagcacgacgtcgatggcgaacacggtggcgaccgtcgcggcgaggatccagacgcgcaccttcccccagaaggcggcgcggcgcaggcggagggtggcggcattggggcggagctcggcggcggcggcctcgacgagcgcggcaacgaggcgcttggagcgggggctgaggccgcggccgccgcgcagctcggcgagcgcgaggctgatctggtccgggaggggctcctcctcctcctcatcgaccatagccgtagcctcggcgggcgctgtgacctgcacgatataatcacagctgtcgaattgtaaaatccaaattcgtagacgcactcgaatcgagcaaattctggaacagaaacatcatttccagttggaaacgacaagtggattcagaatcgaagcaaactgaacataaagggaaacacaaatgaatctgaaatgattggggagcagagaaactgtaatcacactggaatcaaatcgaagttaaaaaaaaaacgcccgatgccataaacccaaaccaaaacccagagcgtgagcatttcaaaatccaccacctcggtgagagcggagtcggcggaagcggtgatggcgtcatccgggtccggggcggcggagatgagggcggcggtggtggtggtggaggaggaggagtcggcggggtcggggaggtcgagcagcggcgcgaggtcgtcggggaaggtgaagtcgccgtcgtggaaggccaggcacttggcgaccccctggtggttggttgatcgaaagggagaggacaaggtttagcggtgggcgatcgaggaggaggtgaagggcggggaggtttggttaccttggagttggcggcggcggggatcggcggcctgggggtggaggaggagccgacggatggccgggcggaggcggaggaggagcggatggaggcggggcgcggggtgtgcacggcggcgggagacggcttcgccatggctcctctcctctccgttgctgcgcttctctctctttgtggctccttccctcatgaagaggagagaggagagggaggaggaaggcaacttgaattgggccgcttccatcatttgggcctcgcgagcgaacccaattcccagcccagcccaccttagagagaggagacagagacggagacaaatcggtggatggggcccaaaaccgtctcttcctcctccttcgccttcttctcccttggtttttccctcgtgacatcacggacaccagcggcgatccatcggcgatccaccgcgcgcgcttcgatcggcgaccgcctcaggtgagctccgcgctcctccctagctccacccccatggtattcccctcccttggccatgcctcgagagtcgagacgatccaagcggattcatccacgcgagtctcagattcagatggcctaatcgatccaccatcgcatcgcatcgcaatttcttctctcatctaactcttcttcttcttcttctctcctttgccagttagttagttaagtttccatggcggggaggcccagcatcccgaccaacagctccgctctcatcgccatcatcgccgacgaggtacgccaccccaacattagcttcatgtttgcgccccaatcataccacaactcctgaatagccccaatcataccatacctcctgaattgccgaatgcccactcttgtcttgtcatgtctgctagcgatccatttacttgcacttgcagggatgggatgcctcaatccattcctccaactaactagctaatcactgcacttctgttgcatgtatgtatgtatgtatgttataagggaaactgtttttcaataccagatgtgtgcataatctccagtccttctctagttgctcaacttgttgccttattactacttgtccaatcacccgagtttagtaattttgtcacgcattttgctagctatggaattggaatactacggttacaggaaagaaataaagtataatgcatagtgttttgttctataataacatgccgatggtcaatatgaggaatgaaagctggctgttgcttaagcaaaattgtctcaaggacacttgatacttccattctcacttgcttcacatgtactcctgaattcctgatcggttaattcacagtagcaacccatagtttccaatcagcatcgttcaatgagaaccagaggagtaaactgaagctcttaataaagaactgacacaaaaccgcatcctacctttgttaatagaaaaatatgcaacactcttttgttggtcttgacataagctgctctaagagtagccaggttccccagtgtttaatcatgattatagtcatctgaaaggaatattctgtttcctcccctgtgtttgcaggacacggtcactgggtttttgttggctggagttggcaatgttgatctgaggaaaaagacaaattaccttattgttgataacagtaataacctcaactttctaacgtgcaaagctgtttaatttttccatcaatgtcaggctgcttttattctgactatatataaggggaacatcgcgtgacactctattgatcatctcatgtgcaaaaaacatattatcattacccaattgcatgtaccattttaaatcaatgtaaatctatctttccattgttagtagctattggcttattgctgtttagtgttttaccacaatacagaggatgcactgtgtcaaatgatctttcttcatgattaaaattcattttttggaaatctgtcaatgtagtagtggtgcctattttggtcagggatgtcaaacttctagaaggttggactgaccctgtgaatttcttgcttactagagcaatatagacatgttttgcatttcggtttggtaactggtttttttttttaacagtaatgaagaaagttggatcttgcatctcagtggcaattgatttcttatttcaggacataaatagcatccctgaacttatggttcattgttatgttatccttgttgattatattatgtaaccatacttcctatatgctatgttaaattagtactccatagacttcataccaatgagttttaccatgacatgttacagaaacaacagtcaaacaaatcgaagatgcatttaaggaattcactacaagggaggacattgcaattgttctcatcagccaatatgtaagtatcttgattgtatacatccagctatttcttcttctgtttgttaagatgatcaatgatcatcttatcacttatccaggtcttataaaatgagaatggcaaagcaagattttctcaattctagactcagattcaattatgtgtctttggttgatagttggccttcttttgttggagtgttttacatctccggagttctcaatatggcatgtggcaggagcatagccaacaaagttgtataataacaacgatatcaatgttaattttttgtttttgtctgttttatcatccagtttactgatatgcttacatatcagtaaagccaaactgtagcatgctaaggtgcttatagaacgttgtaaagccaaactatagctctagctagccttaaagctagaatgttagatctaactagtcaaggcacttgttcagtcctatttacagagttgtggctagacatgtagtgttaacagcaatgggtgtagaaacatttgttcaacatgacacctgattcagaagaaatagaaaatagtcagttccacagaattaaggttcctacagctctgcaagccttcgtagttgtagtccttaggaaattttgtgcagcctaaaatggtcatccgttgtagacaaatcctgattgttttctgtttttcatttgacaggttgcgaacatgataaggttcctggtggatagctacaacaggcccgttcctgctatattggagatcccatccaaggatcatccgtatgacccagcacacgattctgttctttctcgcgtgaagtacctgttttctgctgaatcggtggcatcagataggcgataaaaactgtttgtgttatgcaacatgggcatcctactttgtgtgtaacatttaccctttgaaactgctcaatttatgcctattattgtaaactccatttttgtgtgaataatgagagggacgatcgggcagatgaactacaacaaaataaagacacgatgaattcatgtagctccttttgtgtatgactctggtgttcacaaacggacatattgtatgtcgatgttgataaacgatgattttcatttgtggtaattatatgtgtccatctatttactgctaggcatgtaagtgcttttgtctttcagcgtgtaaatacggcattgacaagaggctaatggtcatattgaccaaagtttgccagtgagaaaaaaatctgcccgtctcaacagaatagattttcaacagcttagatgactaggcgcgtgttttgaagcaaaattgcagtgcagaagagaagttgacgtttgagagcagaatattcagattgcataaatatatgtccaggcttataatctggaactaaaagttccagttggagatgaaacaagagattaaaacatggttaatcacataaaaaaaaggaaccagcattttcgtaacagtcagcatgccttgaagcgtttgaaactagagtattacatcacaaagaagaaaaggaaccgaaatattcagaacattcagcatatattattaccacacagcgaatcacagttttgctttgcaccgagtaaaattaagaccggaagtgaattacatgaggcgacaccatcaccaatccctctgtaatttgcttcctcagcagctcctgctcctcgatggtctgcggataccatgacggagcaaccttgatcttgggatccaagtcttcgcagcactcgagcaacttcctgtcgtacagggatacatcctctaggttaacagcagcttccatgatgtgcctgatgtatccaaggaagttgtcatttggttggaaaccatagattgtgagtttagtcaggttgtaatgcctgaaaccatcaggtgcagatgactcccactccacgtttgctttttcagagtaaccctgttcttcccgttccaccttgtcggtctgcatcccacaccaatggtcccaaaccgtgacgcgcatctccttcagggagggtgctgcctcgagaaagaagcatgtccaagaaatatcacattcttctgggagttcatccagattcagaacttgcagattccgaagaacaggcgccaacagtttcgggcactctggctgaacccaaatctgcaatacataccagcaataaaggatgtagattaagttgagaatgagggacaaataacctgagagagagagagagagagagagagagagagagagagagagagagagagtcttggttaaactaattaccttttcacttccgaagttgaggtacaggtcgcttatgttggggacattagcaaggaagtgacttaacctgataacctcctgatatctcatggctacattagtgaggcttaggcttgaaagcagcgggacattgccaaaagacaaaggttcatggggacagacccacaaactaaaatccagatgtttgaggtttggtaagtagttgagctcgactaattctaaacttgcatgatagatatcaagctcaacaagtcgtgggtgctccacctgtagctgcaacacgctatcctctgtttcacagaatgacaaacggagatactctaacagtttgcatgtggcgatgatattcggaatgtcagtttcaccaagcttcaagttgcgtaggtagagacgcgtaaggccagcgaatgcatcggtacaggcaccgaaaaatctcatgagttgcttcccattgtggcggagatcataagtagagtaatgttccggcttcttctctggcagaataatgaactcgacgctgtcgaggaggttgttggtggccatggctcgggcgacagctttgccaatggtgagacaatcatagtatttcaagtagaaacaaacgctgagatggcgaagggggatatcctgtcttctgaaattgagaatgttgtctgttgcatcggcgacagcagcgttcatcgggattgtatccttcaaggtggcataaccgcagtcgggcacgaaggaatcaacgctaatttggaatcgcgagagcatgtggcggaggtggatcgtcctcttggaaaggaggcaggttctgacagcatcgggggtgttgagacggtcaaggatgttgagcagcagatcatcaggtagcttggtggacctatccactactagttgggggttattgtgagctgctgatttcttctgcatcaatcaatataattgcaaaacgaaattaattagtgcatgcatacatatccaagagaatacagatagagaaatgcaaaaggaaggaaacaatagtagatgaataaaaggctagttaggcggcttacattgcggttatggcaactacccttcttattcttcatgatggtatggtggttaattccaacgaggtgtaaagtagcttggctgatggattcgatttcttaattggttgtttaatattgcagcagcgcttatatatgcttaattgtttgcgatgaatatataaagaggaggagaaggacggtgacctcgactgccaactagtcctccgtccgtctcctaaacgaaacgaaggagaagaatttccatgtttgttagattgagtcctttacagatttttctttttgggaacaagtccattacagatttaaaaggctactcttagatcaaaggtaaaagcttcttactgtttgtatgaactatctttgtgttttcccccgttgaagaatttagttggtgaaaacagatcttcttactgtttgtatgaagtagcattccaggtttgtagactgccggttcatattgaaaacaaatctccattctctaaacacatctgagagtgttttttgtttattgcttgccaaagccaggagcaagaaccaggcaaatctcaactttcccttaggatttatctctaagtaggacaatacacattacaaacctggaatggacaatacacagtttttacccggaggtagtaccattcactaattctaaaggtcttaaaaaagtgagagtgcgatggcaggtgaaaattaacaaccccatactaagcttaaatagtggggtaaatagtaaccgtaggggaaaggataaacgaatatattttttcactgcaccaaaagaatatcagaatattcagaacattcacatacattactccagttactggtccgaaaccaagttgcaggaaacacgatgagtgaaaaaaaagaacccgaatattcagaaaactcaatatgtattactgtatagcaaaaccaagatttacatttttgcgcatagtaaattcagatttaagaccggaagcgaattatatcagaggaagcaatcccgaatccctctgtaattttcctcctcaccaactcctgctgcttgatggtccgcggaaatcttgacagagcaactttgatcttgatcttgggatcaaggtcactgcagcaatcagagaacctcctgtcgtacagggatatcctcactaggttaaccgcggcttccatcatgcacctgatgtatccaacgaagttgtcatcaggttgaaaaccgtagatgatgagcttaaccagattgtgatgcttgaaaccatcaggttgtgagctttgccactccacgtttgttttgtcacggtaacccagttcttccccgttccacgctgtcagtctccatgtcacaccaatggtcccaaactgtgatggacatcttcaggttaggcgctgcctcgaggaagaatcttgtccaagctatatcacatccctcggggagtctatccagattcaaaacccgcagtttctggagaacaggcgccagaagttttgggcactctggcttaacccaaatctgcaaatacaagtaataaaaaaaaaaggaagaatgtggttttaagttaattaagaatgaggaacaaataacctgacctgacaaagatgcttggcttgcttaaagtaattattattaccttttcacttgcgaagctgaggtgcaggttgcttatgttggggacattagcaaggaagtgacttaacctgaaaaccttctgatatcccgcgcttacattgttgaggcttaggcttgaaagcattgggacgttgccaaaagacaagggttctccgggagagacccacataccaaaaaccagccgcttgaggttgggtagagatttgaggtcgactaggtggaaacctgcatcgtaaatgtcaagctcaacaagccgcgggtgttccagctgcagctgcaacacgctatcctctgaatcacacaccgacatgcacagatactgcagccgtttgcatgtggagaggatgttgggaatgtcagcttcagcaagcctcaagttctggatgaagagctgtgtaaggccggcgaatgcatcaagataagaaccaagaaaggtcatgaactgcttcccattacggcggaaatcatcaacggtgtaacactctggctgcagctccgtcaagatgatgaactcgacgctgtcgatttggttgtaggtggccatggcttgggaaacagctttgccgatggtgagacagtcgtagtatttcaagtagaaacatatgctgagtcggtgaagagggacgtcttggcttctgaaactgaggacattgtctgttgcatcagccacggcgctgttggcctgaataagacgaggcaaagagacaaaacgagaaccgttgaagaaggaaccagcacgtcgggggtgttgagacggtccaggatgttgagcaggacatcgtcaggtaacttagagagcctatccactggtagtggtagggaaccagtggatgctgctgatttctgcatcgattgcaaattgcggaaactaaatatattagtggcaggcaccaggcagcgaaccaatgtagtataacttacgaacaaaacacaaaacaaataacgtaaatgtaaactaaactaaattgatgtttttacagcacataacaataataataaatagtttagaagtagtttatcagagacagcatagcaacatccatggatctgacagacaggcgagagagatgcagatggaagaagataggaggcggcggcggcttacgttgcggttgcggcgacttcccttcttgttcttcatggatgacctgaagcgggcgctggtggatgagatcggaatcagatgtgttggcgatcttcttgtgtttcttctatactagtagatatataaatatggatgaaggcgctcggtcggccgggccggatcctatgcgaaattggctctcggacatcgaaatcccccactcccttttcgactgctatttcggcaagtcatatcaagaaactccattgtggagaagaacaagatcagaatcagaccagatcgccgttcgccgttagcggcggcgtgcgttgccgatggcgatgggatttagggtttttcggcctctcggggacgacggcctagtacactttgctgggccgccgatataaatgggcccactcatcctttctccctcagctatggggaaaagtacaccgaaggtcccacaacttgtcatcgggttacaaaatcgtccccaaaccgcaaaacaaaatactaagatactggaggtccctcaattagcaaaaccgttcgcttgagatcctatgtggttttgaccccggttttgtctgacgttgcggatgagttagcgtggaccccacctgtcagcattgccacatcaatcttctctctcttttcctctcttctctattctttctcatcctcatctctctctctctcctctccgacagcgagtctgtgaggtgggagaggaggagggcgtcggcgaccggcgacgcggcggcggaggaaggggcggcgcgcgggcggctgagggcggagcggcgacgcggcggcgggggaaggggcggcgcgcgggcagcgggggaggggcggcgaccgagaggagttcagccgcactctcgccgagcgcctcgtcctcgacatcgagaaggtgatgtgccagctcgacgctctcccttctaggctaatgccccccgtgccgccggcgccaccttcggtttcagcgggagcacctcgtgctcctcctccgcatggaccttccccatcgccgccgccaccgctggcggccgccgttgaggcaccgccctcctcctctcccgccgcccacgcgctgctcgtccgtcggccgcgcgtcgcccctcccacgccgcccgcgcgccgccccttcccccgccgccgcatcgccgctccgccctcggccgtcggcgcgccgcgcctcccctggctgcccgcgcgccgccccttccccaccgccgcgtcgccggccgccggccgcctgtcgccgacgccctcctcctctcacgccgcccgcgcgctgcttgtccgccggccgcgcaccgcccctcccccgccgctcgcaatcgcagagaatggagagatagaaagatgagatgggagagaagagaggaaaagagagagaaggctgacgtggcaatgctgacaggtggggcccacgctgactcacccaccacgtcagacaaaaccggggtcaaaaccaccagaggacctcaagcgaacggttttgttagttgagggctccgatatctgattttgcggttgagagacaattttgtaactcgatgacaagttgagggactttcggtgtacttttccctcagctatgacaccccacaactgttagtatgttacaactactagtaatatattaattgatcttcctcagtggtttttaaaggtgatttttgtactatgtgacattattcctataaataattagaccttgtgtagttggcaaaaaaaaatttactcctacgtgtcacatcggatatacggacacacatttgaagtattaaacgttgtctaataacaaaacaaattacatattccgtcaggaaactgcgagacgaatttattaaacctaattaatccgtcattagcaaaagtttattgtaacatcacattgtcaaatcttagcgcaattaggcttaaaagatttgtctcgcaatttacacgcaatctgtataattggtttttttatctacatttaatactccatacatacgtaaaaacgaaaccaggatattcaaaacattcaaaatatattgcttacattatagtatatccaagttactggcctgaaaccaagttgcaggaaacaagagaattctaatgcatgccttgaaacgtttgaaactagagtgtttcgtcacaaaaggaaagaagaagaaaccaaaaatattcagaacattcagcatacattattgctactcagctaatcgcattttcgcgctgatgaattaagaccggaagttaattacatgaggcgatgccatcaccaatccctctgtaatttgcttcctcagcaactcctgctcctcgacggtctgcggatactttgacggagcaaccttgattttgggatccaactcttcacagcaatcttccaccttccggtcgtacagggatatctcctctatgttaaccgcggtttccatgatgtgcctgatgtatcccaaaaagttgtcatcaggttggaaaccgtagatggtgagcttaaccagattgcaatgcctgaaaccatcaggtgaagatgactcccactgcacgtttgttttgtcacagtaaccctcttcttcccgttccaccttgtccgtcacaatattacaccaatggtcccaaattgtgatgcatagctccttcaggaagggtgcagcttcaagaaagaagcgtgttatcacatccttcacggagatcatccagagtcaaaacttgcagattctggagaacaggcgccagcagtttcgggcactctggctgaacccaaatctgtaatacaaacaagtcataaaggaaggatgcaggggttaagttgagaatgagatgttcataacatgatagagagagagacttgcttaaattaattaccctttcacttttgaggttgagatgcaggtctcttatggaggttacattagaaagaaactgacttaatctgataaggttgtgcaatctcagacctacattagtgaggcttaggcttgacagctgcggaacattgccaaaatacaagggttcttggggatgtctccaactattaaagaccagccgttcgagtttcggtagagaattgagcttgactagttttaaacatccgtggcagatatcaagctcaacaagccgctggtgttccacctgcagctgcaacacagtaccctctgtttgacacatgaacatacgcagagactctaatcgtttgcatgtggcaataatattgggaatgtcagtttcagcaagcctcaagttctgtaagtagagtcttgtaagcccagcaaaggcatcagtacaagcaccaaaaaaggtcatgagccgtttcccattgttgcggagaccataaaaagtgtaataatgtagcttataatctgtcagaattctgaactcagcgctgtcaagcttgtgggttgccatggctcgggcaacagctttgccgatggtgagacaatcgtagtattttaagtagaaacatatgctgagttggcgaagagggatctctttggctctgaaattgagaacattgtccgttgcatcggccacggcggcgttcatcacgatagtctccttaaaagtgatataatcaggatctggcgcgaacgaaactactccctccatccaaaaaaaaagtcaaatctgagtttccgtgtccaactttgattgtccgttttatataaaatttttttataattcgtattttcattattgttagataataaaacatgattaatattttatgcgtgacttgtctttttaatttttttttaatttttttaaataagacggatggtaaaacgttggacacggaaaccagggtttgtctttttttttgggacggagcgagtaggccaatttgaaagcgcgaaagcatgtgtcggaggtggagcgtcctcttagagaggaggcaggttctgacggcatcgggggtgtcgaggcggtccatgatgttgagcaggatgtcatcaggtagcgtggtgaacctatccaccaccattacgggagctgatttctgcatcgatatagtgtttatttgtgaaactaataataaattaattagtgcaacagtagtcatggatcgacagggaaagagaagactgacatgacagatgcaatgcaaatcagtaagtactcccttcgtatttatgaagccattgatttttcgaccaacgtttgaccattcgttttattcgaaattcttatacaaatatgaaaatatttatgtcatgtttaaagaacatttaatgacgaatcaaatcataataaaataaatgataattatataaattttttagataaaacgaatgatcaaacatttaataaaaagtcaacggcgtcatacattaaaatatggaggtagtaggaagggaatagacggcttacattgcggttgcggcgactacccttcttgttcttcatggttaatgaattccaatgttcaacggcggggcctgaccataacagacaagcgctgcgcttattgcgatggacgtcggctcctcctgacttgtttatatactgagaggagaagaagaggaaaagaaggcgcctccgactgaatccgattagaataggaaaatattggacacactcgatgatttttatggcttttcatcgcattcgagactgattcgattgcatgagctgtttatatatacttttttttttggaataaattggttaaaggaatcaatcaacaatagaaactcaatactagtactagtcaccagctgatggatggaggcgtggcgtgtccggatagacttttccaggcgaaggctacggaacgaaaccgattgctaatatggttatgtttagttcaacgtaaagtttgaattttaattgaaattagagataatgtgactaaaaagttatgtgtatgatagattgatgtgatagaaaaggactgaaatttgaatccaaacttcgaatctaaacatagcctatatatacacacacttcagacaaacagttaccagtctttttaccttcatcttcagtaggtcagtaaatattacaaacctggcattgattagattataaacgcctttgatctcgcttgaatctagtaccactgataagagattgaacaccaatctcttggtggtacttgaacaaaacacatttgcttcagctgtgagctggatggcaagttctcttactggacaaagggtggaaaatatttcattgcaccaaatagaaaagggaaaccagaatattcaggatatatattattatgcagcaagcttaaatatgtgctggctaccggcctgaaaccaaggttgcaggaaagaagacaagttcaatcaatgcctttaaacgtttgaaaccagaatatttcataacaaagaaggaaaaggaaccaaaatattcagaacattcagcatatattatttccagtaccacacagcgaatcacagttttgcaccgagcaaaattaagaccggaagtgaattacatgaggcgacgccatcaccaatccctccgtaatttgcttcctcagcagctcctgctccacgatgttctgcggataccttgacggagcaaccttgatcttgggatccaagtcttcacagcactcaagagccttcctgtcgtacagggatatgtcctctaggttaacagcagcttccatgatgtgcctgatgtatccaaggaagttctcatttggttggaaaccatagatggtaaacttagtcaggttgtaatgcctgaaaccatcacgtgcagatgacctccactccaagtttgttttgtcgcagtaaccctgttcttcccgttccaccttgtctgtctcaatctcacaccaatggtcccaaactgtgatgcacatctccttcagggagggtgcggcctcaagaaagaaacttgtccaagcgatatcacattcttcagggagttcatccagattcaaaacttgcagattctggagaacaggcgtcaacagttccgggcactccggatgaacccaaatctgcagtacatatcaataataaaggattcagatttatgtcaagaacaaggaacaaataaccagagaggattgcttaaagtaaattaccttctcacttaagaaattgaggtgcaggtcttttatgaaggtgatattagcaaggaactgacttaacctgataaccttatgccatctcatggctacattagtgaggcttaggcttgaaagcaatggaacgttgccaaaagacaagggttcttggggacaaacccacacactaaaaaccaatcgtttgaggtttggtagggagttgagctcaactaggtctaagttcgcagtggagatatcaagctcaacaaggtgtgggtgttccaactgtagctgcaatacactatcctctatttgacacgcggacaatttcaaatactctagccgtttgcatgtggcgatgatgtttggaatgtcagcttcagcaagccttaagttgcgtaggtggagacgcgtaaggccggcaaatgcatcagtacaggcaccgaaaaatgtcatgagcagcttgccattgtggcggagatcgtcgatagagcaatatagtgcccgcttccctgtcagaataatgaattcaacgctgtcgaggttgtggctgtgggtggccattgctcgggcaacagctttgccaatggcgagacaatcatagtacttgaggtagaaggttatgctgagttggcgaaggggaatctcttggtttctgaaattgaggatgttgtctgttgcatctgacacagcagcattcatctgaatctgaattgcatccttggaggtggcataataaccataataatggggcaaaaaggaatgcagcgaaatgtttaagtttgagagcaaatgtcgaaggtggatcgtcctcttagaaaggaggcatgtcctgacagcgtcgggggtgttgaggcgttcgaggatgttgagcaggacatcatcaggaagcttggtgaacctatccactactagtaggtggttattgtgagctgctgatttctgcatcaatataattttgcgaaacaggattaagcaaatataacaagtaaataggtaaatgcaaaatgaaggaagcgaaagatgaagaaaaaggcttacattgcggttgcggcgactacccttcttattcttcatgatgctgatgatggtgggtggttaattccaacgaggtacggtgtgagtatctagcttggctgatggattggacttccttgttggtttattattgctatatgaaggccaacggcggctcttcctgtcctgtatatacaaggatgaggaggcgtgggcgaggtctggccgacgggcaactactactccatctccgtatcctaaagagaaaatccataaaatgccatcgacaagcaccctaatcctagaaatgccatcgacaaagacaacttcccaaaaatgccattgcacaagcctctttctcccaaaaatgccatcaccgtcaactccacaccgttacaaccgttatttttttaataatgactattttgccctcagtgcaaaatatacctagtttttactgtcaaagaaaaaaaatgaaatttctaaccctaaccctaccactaccgatcctgatctagcgctctccccggcggcgtctcggcgacagcggctcggcggcgatcccctactgcggcggcgcggcgaggaggacgatggcggcgacgcgacaggacgcagcgaggaggaccagcgcggcggcggtgcggcaagggcacggcgaggaggactgcagcaaggacgcgacaggacgcagcgaggaccaggacggcggcggcgcggcaggacgcggcgaggaggtctacggcggcggcggtccccgacggtggctcgatggctgtcctcgacggtggctatggctcggcggcggtcccttgctgcggcggcgcagcgaggaagaccatggcggcgacgcgataggacgcggcgaggaggactagggcggcgatggcgtggcaggatgcagcgaggaggaccacggcggtgacgaggcaggacgcggcgaggaggtccacggcggtggtggcgcggcagggcgaggtgaggaggtccacggcggcggtggcacggcagggtgcggcgaggatgtccacggcggcgcggctattgcaggatgtggcgcgggggccgtagacgccggcgaggagaggtccgtaggcgccggcgaggagggggaggagaggcctgcagccgcagttgctgaggtccgtggaggaggaagctatagtcctagctggtgttgcaactctgatgttgaaattttcccttttgtttgatttgatttgaagactttgtttgatttgatttcagtgaatttaattatgaaataacttgattgatagcaaaataatgatgtttgtgaatttataaactaacagaaatataatttattgtgagcaagcaatgcaaaatgatgatgtgtgagtaaatggttgtctaggggtaagattgtcttttcatgcaacttaacggaaagatgctaacggcagtttgacggtgatggcatttttgggagaaagtggcttgtgcaatggcatttttgggaagttgactttgtcgatggcatttctgggattagagtgtttgtcaatggcatttcatggattttctctatcctaaacggaggaggagggaaaggaggactctgaattggagtccgtctcgtcctagtctggaattggattggaggaggcacaagggcaagtgacgcatggagagagattagggttaaccttgcagagattttgctccggctccggccctaaggtggctgggcggcggatcaggggagacgctggcggccaactccggggtccccagcccggagtaacttagtgggcctatccactggtagggaaccagtggatgctgctgatttctgcatcgattgcaaattgcgggaaactaaatatattagtggcaggcagcgaaccaatgtagtactagtaatatgctcgtgctaacgctacgataatatttagtaatacaaataaaataatcaaaataccacatatgatatatcttttgtatctcaaatattaaatgagatacatttatgatttaaaaggtagaggtccccaccaacgtcgcaccaagctgacacgcacaaaactaacaagattatacccaaacggcacgacgtcacaaagattacacccaaacggcacgatgttacaagttgggtctccacccacattagttgcaccaaaccaaatactacacatacaaacctggaacggtcatacgtgtcgtatgtccgaacaagaaaaaaacatatctgaacaagtgggtcatgaaccgtgcacgaacattagattaccatgtggcgcttttggcagcacaccatttttaagcaatcctatatgattattcaaaacaattacagtgattcagcccataacttatacagtttgatgatagtatgtggatacgggtcatttcataggaatgtcacaaataacaatgttgtgttacatataatgcgaaatctgtcaaatttcaccaaagattttcacaaggctatttgagtcaagcatctttctaatgttcttttcttgtcttccggccacttttgtttacaacacctctactcggtgcaggactccattcttttttactacatctgtcaaagttaaggaagttaaggggaaaaaaaagatggttaccttgtaacagccactgttacctcgatagtgccatgctgctctggcaaatcgccatggcctccatacagctgctcacaaagattagagaccataatttggccaagctgaaaataataaaaatatgaagtattaaaataataaaaaaaatcaagcactcggtgcagcaactactgaacattattgaaagaaccagcgagaaattctttttggctcaattaaccgaaaaaaatatttgatttcccctgttccacgtgtagtgatattaatttgtagttcagcagcttcagcattagaaagctaaattcaattcttctggcaaccatatgtttaatagaaaacagtgtacttgtttgatatccaatgccaaaaccattgataaataaaaggaaaacagtgtacttgtttgatatccaatgccagaaccattgataaataaaagaaacctgaagcgagctaaattaaaatactgtctggcaaaggatgaaaacagacagattacctagaaatttattgaacaattttaaatactatgtaacataagcaaaatagtaataatcactcatcaacaggtttagccaaaaaaaaaagattagctgtgctcttctgttccaattttttttttctagatttcctgcaaattttagaaaggaatacagccaatgatctgttagtgcaataaaatttgttcagtgtaattcctgatgacctggtaaacaaacagatggtcggcgacgaagtccaccggcggcggaggcagcggcccatcgccatggggacggcagcagctttacttccttcttcattcacctcaatcaccgccttgtggatgacttggctcacaaacaacggcaagccggagccgtcgtcttccaccatcacggataggttggtgagctacggtgagaacggcagccggagccccagctgcccgaggacgccgacgacgctgtcggcgaaggacaccttgaacttgggcaccatgaactcgccaacccgcaccgattcggacgaggtgctcgtgcaggaacccggccgctatgccatcttttccacgatgccacgcagcccgtcgcgtgcgtcggggaggaagatgaccatggcgtactgcgtgaggtcgtcggccgccgcggccgcgcttgcgcttgttacggagattcggcgcgctgtagtggagcttgagcaccttgaacccgtcatgcacggcgacgtactgtttggactttggagttgctcgacgacatgtacgccggcgtcgaggcggtagaacggcttcttcttggtgttcttcaccaatcaccatgaagggatgctcccagctgccctttaggtagatggcgttgctgagcacgatggccatcgtcgggccgacggatcccggcggcaggacggagtcgatgaggcccctcctcacctgtcgcgtccactcgttgatctgcttcctcgcttaatttcccggccttcaagaaaccccaaccaaatcaagaacagtgtacaaaaatttaaaattatgatttgcatcgccctgaattggcatctggatatgattcattgattcatcgtgcagattagtaatggtagatactaaccttgttcttgaaatcgacggtggtggcctcggccttgtacctgccgacgacggcgtcgcaccacacgccggacgtgaacgcgacgcgcggcccacccgacgccgacctgtcggccagcgcggtggtcgccatgtagaacggcgaggagctcatccagagtgcagcaatgggcgaggggaggcggagcgatctaggcaccgcggtttgccggaaggagagcgcgtggcggcgtggggggcgtgattttcggctcaggagcgatggtttctgcgagtgggggatgcgagaggaggttgaggcgtacgtgggacgatttgaggcgttggattggatgattctggaccgttggatttgatgaatgagtaatgtaggtgtaagagtgtgttggtgaattatagggtagataacgaacgaacaaaacacaaaactaaattgatgtttttacagctagcaatgacaataaataatgatactatatatatatcacagtataagattggcggcggcggcttacattgcgattacggcggctacccttcttgttcttcatggatgatacacccttgttcttgttgcgtattcaatccgatggatcggtgtgagtattaagactctcctcctcttcctctcgatcagtcggcccggatcctatgcgaactcgtacatggatcgatcgagacagaagtcacctcccttaccttccctttttcgagatcaaatctgatgccaatgaaacagcacacagctatacctctgtttttttttcttttattcccctcgagtactacgggttctgttttgaacgtttggaaattggaactgatgaagtagggtacggtagggtgtatggataaagtaaggaaagacaggccggccctaaactttgggaggcccattggaagcggcggcccagatgagagcagatcccctgtcacgccgacgccgccgccgccaccgctgttgccctaacgccgatctaatgctggagctccattcgcttgttcttatactatacaagtacctatgccggtgatgtatagctgctgctgctggtgcttggattcggttgaatttcataggtatggtcggtcagctggaatagcagtcggtgtgggtatatatgtagcctagttcgcatcgggcggaagctgggaagggaagatctagttcgcatcggagccggaatcgaatcctcccttcttttcctcttctcctctccatcatcagtatataaacaatacgcgcagcgcttgtccggtcaggcccgccgccgttcagaagcttaacattggaattggattttattaaccaccatgaagaacaagaagggtagtcgccgcaaccgcaatgtaagtctcttttctttcccttccttaattaattaattaatttgcattattattattgcataataataatatctgcctttcctgtcgatccatgaattaatttcgatgcagaaatcagctcccgtaaccgtaatggtggtggataggttcaccacgctacctgacgatgttctgctcaacatcctggaccgcctcaacacgcccgacgccgtcaggacctgcctcctctctaagaggacgctccacctcccacgcatgctttcgcactttcgaattgccctactttcattcgcgccagatcctgattatatcacttttaaggacactattgggatgaacgccgccgtggccgctgcaacagataatgttctcaatttcagagccaaagacatccctcttcgccaactcagcatatgtttctacttgaaatactacgactgtcttaccatcggcaaagctgttgcccgagccatgacaacccacaagcttgacagcgctgagttcagaattctgaccgattataagctacattattacactcttgatggtctccgcaacaatgggaaacagctcatgaccttttttggtgcttgtactgatgcatttgctggacttacaagactctacctacagaacttaaggcttcctgaaactgacattctcaatatcattgccacatgcaaacggttagagtctctgcgtatgttcatgtgtcaaacagagggtactgtgttgcagctgcagctagaacaccagcggcttgttgagcttgatatctgccacggatgtttaaaactagttaagctcaattctctaccaaaacttgaacggctggtcttttatagttggaaacatccccaagaacccttgtattttggcaatgttccgcagctgtcaagcctaagcctcactaatgtaggtctgagacggcacaaccttatcagattaagtcagtttctttctaatgtaacctccataagagacctgcacctcaactttgaaagcgaaagggtaattaaattcaagcaagcctctctctctctctctctcaggttattaacacctcatactcatcttaacctgcatccttcctttatgacttgtttgtattacagatttgggttcagccagagcgcccgaaactgctggtgcctgttctccagaatcttcaagttttgaatctggaggatctccctgaaggatgtgatatcacatggacacgcttctttcttgaagctgcacccttcctgaaggagctatgcatcacagtttgggaccattggtgtaatattgtgacagaccaggtggaacgggaagaagagggttactgtgacaaaacaaacgtgcagtgggagtcatcttcatctaatggtttcaggcattacaatctggttaagctcaccatctatggtttccaaccagatgacaactttttgggatacatcaggcacatcatggaaaccgcggttaacctagaggagatatccctgtacaacaggaaggtggaagattgctgtgaagagttggatcccaagatcaaaattgctccgtcaaggtatccacagaccattgaggagcaggagttgctgaggaagcaaattacagagggattggtgatggcgttgcctcatgtaattcacttccggtcttaattcctcggcgcaaaaatgcaattagctgagtagcaataatgtatgctgaatgttctgaatattttggtttcttcttctttccttttgtgatgaaacactctagtttcaaacgtttcaaggcatgcattagaattctcttgtttcctgcaacttggtttcaggccagcagcctggatatataatgtaagcagtatattttgaatgttttgaatatcctggtttcttttttttgttgttgcaataattccccttatccttttccctacaactacaagagagcttgccatccagctcacaggtgaggcattgttttgttgaagtaccatcaaggaattggtgttcaatctcttattagtggcactagatacgtttggagaatccatgccctggtacaggcaatggagtttatcttccggcattcctttgcgaacaaaggaggcatatttctgtttcttcagtctcaagatgctactcattgatgcctctgttccaggcgcatcattcctagagatcttgccagtggtcagatttctccctccctgtttaattaagagaagttctactcagtggctgcagggagatttggcaggaaatggagaccagactcctcagttgaggactacaatggtacatcgaaaacaaaggatttgagaacaggcagaggagatacagaacagggaggttttgggtgctgtgaggatcagaggaggcgtcacaagtcgaggggcgaatctttgtttaccaataaaaggttatgctttcatttatcttccattgttatctatttccttgtaggtagagatgcgaatgcgagttccaaggagtgctgtcccaaatacctgtgacttcaattatacagttttagaagttatgtttttatctaacttcaattgtgcttgcagttttagaagataatgcttcacaataagaagatagttgacacactagagggtaacattttatagccccccccccctaacattgaagtgggtgtttcacttaatatcttgccctgtatgtttgaaaagggaggtggatgatagccatgtttgataattgattgagcgcattctaacgaaaatatacatgaatagataaaaatacccactgccgtagattgatgcttagacactttgttaatttgaaattgccatagagagcttatattgatcgagttaaacagcatgcagctacaatttttgtcccaactttttctgctttatgaactcctaagttgaagaaagttggtttccatggtaaacttagtggataaccgagacttgaacttattcattaccttacattgtgattgacacttgagctgttcaatatattttgcttattccattttatactatgtatctctgggagaactattcggctaatttagttttattttcctttttagctgttatggcaaatgcaattctcatcaatatctttatattttattgatggttgacgacagactttgttcaaacacattgttgaaaccctatttaactattcgctctctcttggtagggaatcattgtgatatcatccaaacagttcaaatttgacctttgcattgcagccacatgcaattaggagctagcgatcaacatgcaaatacttagctggcatcactgtaatgattataagttcaaataaatatgaatcactgctttgagcttcaatttgttgttcactgacagtttctttacactatcttctctaaatatatctattctgtacttctattacagcttgtgatgtctgcgataacctgaaagtgctttgtcagagttgagccaggctaagccatcaataatggctcaggtattaaattaaaaatttattactcaaactctcatggatctgttgacataatccaaaactgttttgagaaataagaacccattcttcgtagttttcttgtcttcatgcaacactgaagctgtgaaggaggtgccaattgttctgaagctcctatatgatcgggatgccctggatgaagggtcaaggagtccctggttatgaagaatgccaagccaattcatggagtggctccggagtgtggagtatttccagttcgtgtcatcgtgtgtgattgtcccaaagtcataagtactagagcctggggcgcgcccgttggcgcgccgcctgagtggaacattggtgaagaggcagtggatgattaagcctgagtggaatgatggtgaagaggcagtggatgattagggatatagatgggaggaaagaataagcaagttttggttaaaaaaaataagaaagcaggcactcatagagaagcaaactgcagctaataagatatagacatcttaatacttagtggtctctagtagtaataggcacatatacagatggtctttaacatctgcaaggtagtgcagtatggatggtaagcacttatggtcccaatgacgcatatccaatttcatcacttgtcgcacggcacaatgggctcatcttaaattaaatttgaatatatcaatacacttctaatataaaatttaaacaattgaccagaatggtgttaggatctcaagtttttattgtcgagaccgctcatgttcagaattcaggtatgcactactaatttcgtactaacaaatgaatcaactctatgtaattgtttttcagtactgtataaatcaacatttatgctcacattcttctgaaaaatgtatacccacttcttcaatattatgtccaaacaaagggaaaagaaaaggaccggcttattctcagtctatcctgctgtcaatccttcatcagatgcatgttatgttctcacttccttccaatcttgcccttgcccattgtgatctactgatctgtaaggctgtgagaacctttcaagagagctattgcctgcacaacatacatatgaaccaatttttcattagttcctgggcccgtgaaaactgagtccatctggtcagaaagaggtgctccaaattgcatcatccccttccttcatcttgagtgcgcataagcttgctagctggattacaaaccactccacactgcacctctaattgttttccaccgaccgcatggttgcttgtttcataaagaaaatgttagcagttggtttggtattatagtgatcttcagaaatggtatagggtatacaaagcaacggaagaaaactgatgtggtggtgttccattgcgcatatctgtcattgatgcttcaatatttacactgcccaagttatagaccacctcaatttcttaaatggagaacaaccccaaagcatgttgcttgactgctattattactgaaggcatgtattttttaagggatatattttttacacggtgttcaataacatactttgaacctattattacttaaggcatgtattttttaagggatatattttttacacggtgttcaataacatactttgaacctattattactgaaggcatgtattttttaagggatatattttttacacggtgttcaataacatactttgaccattaatttattccatgttatgctcccaatgaatatgaaattagcatcatatgaaaggacttcaaagtatgaatatcacgagcttgcaaataagcagagtggtagctaaagcgacaacccacaaaaaagatcaatgttgcagtgctgatcaatttattttcactccttgctgcgaatcatctaaaaacctggactactgtcatattacctgaagatgaattattgcgagctgaacatggaaaattctggtatgcaatccaaaggtgtcaaacctgacatgaaaaaggaaaatgatcagatcaccaaagaggctcatcataccataccatcctcaatcttaagtcaaccaaactcatattatttgcaattgactgaaacctccgcatgaattcattattttcgtctctcttttccttatgtctatcaagaaaccatcagtgacccattgcagtcccatttaaagtatttaacatttaagaaaacattcagtacagtaaaatggaagattgagatttgcatcttctgaatattagtgccaaatataaacccatcctgctaccagttgtactaaaaaaaattgactgccaataaccaaaatgctaactactaaaaaaatcatccagtatgtgaagctcctaaatttttccttatgctactttgtaaaactatagtacagagtttctggcaagaaaattggttcccaggtcatccactcatgatggatcagcaagcaatatcactgcagtctcattttccagacaaaaaatatagtgttaggaactcatggagttgattttgtaagatgcagatgagcaacattcagccatcatacagtaataaatcgaaagaaactaagatttacgttgttaaagaagataaccttggatgaatcctaattcaatcataacaaagccaagaatcataatccagtcttaatgaagccaagaatcctaattcccagtgtaccttggatatgagattgatgtcaatggaggtgcgagcaacagtcgacatagtagttgaccctagttccgaggcacgcactatattgccaaaaatagaacatagacaaattacttcttcaaattgcagtgaaaattcatgcattattcattagagggtaaattaccattgattcagagatggcgatcgttgccatttgttcattttagtctatgaatcattgtgttcattttaaactacaagaaccgcatgtggagggagtgaaggggcttgtgcttcagaataattttgatgtgtttcgtgttgaattgaatcttatttaaccctagcagtggtggattgagcttggacttttgggggctacgaacaaacaaaacaagagaagagcttcatccagatgtagaagagaaggtaggcttaatgcaagcaaatttgagacaaaagtaggtgtgagagagagagatgaatcacagaatcagaaagaggatgtggatgctcaccgggatgcagcaggaccacggcgcccctcccctcccctgctgtgctctgcttaccgctgacattgccaccagcttcggcttctttttcggccttggctccagctgcggccactctcacgtcgtcctcctgtggatggactccaacctcgccccgttgatcgttgcgagatgtttccttaacaatagattatatgtgctttctgccttatggagcagaaattataagccagcagacagcaagcaaatataccatgtcaagtaaataaatggatcagttaattgatatcattgacacattcaagaggacaaacttacagggttgtgcatctcttcacttaaaccaaaattttccagaatagaagcaaccaatgtggagaaatagtgtacagcataggagccaacccctacctgaacatcggaataccaatgatatgtgatgtaaccagaactaattgcaatttcctgaagagtgtgccaacacaatttataccagaaagttgtgggcatatggaacttaccgcagatccataaattgtgaggtaaaataaacttttccttcccattggtaacaatttcatcccctataatgaataataggtcacaccaacaatcaatttgatagaacacatttttccataagcaaaaaaaaatcctagttaaaattgagtcactgaacgttccttatcaaaagaaaatggtcttacttcttggtcttcccacacagtttagagttgcctcatggtgtattttacaacaaactaacagaattacaacgaaaactatcttcgctaattagatcaagagatttctatgtttagaatggaaattctataaataaactcagagtgaggtgtttaataacaaaatacagtaagttaacttaacaatttcatatacttaataataagcttgatggaagttcccaataacaaaatgcagtcagttaacttaacaatgttgtctgctgataagtaatcaattagaccatcatgttatgtagaagactgtcaaaaaaacacagaaaaaaaataataataggacattggaaccataaaattttaagatacaaacttacaaggggattatgaaacaaaacaaatatgcgaaccatacgaaaatccaagtgttgcgctaaaaggaatatgtaaataaaaggactatacacgaaaagaagttcataccaagcacagagatgaatcgaaacaaagtgggtacggtctagctattaagagatgttattcaggtaaaaatcatccatctgtatacttcgtaaaacgggaatacttatccttcaaccaaaaaggccgaaaccaccatatacaaaacaaattttgagacattaccgaaatgcattggttttgaagtgaaaggaaaggcatgtcactgcagatttattcacggcaaaagagttgcaactttccaatcacccctccacaaacccactccaaaacccaattctatgactaaaccccaagaatacctaaaataccaagatgctatcagacgcatcttacagcaaaaaccccaaaccaccccaaaggccctaaaccctagatagaacggcgctacgatccccgtgcaaacgcagcagcagtcccaaatccgcccatggtgcaccaaactgcgggcacgattatacctttgatggaccgccccacgatggtggaatcgaaggccgcagtgtcatcgccggtggagatgatgatgggcgcggcgagcgaggctaggagcaggagcggatttgggaaatcccatgatacataagcgttacaagtaaataatgatttacacagtacagcaagcagtgcaatggtttctacaaatataaccgaattttaatttcataggcaaatgaaagacaagcataaattctacaatgtcagataattcaaattgtattgtcatgctccactaactaatgattttaatggaagaatgttgaaaaaaaagtaataagatttctgccagaaaatataagtttcagttcagtacaaaccacccataccaagagaatagcaccagttttgaatgatccaagtgatagcatctcaattccctgtaagataaagagaatcagtaggtttatctccaagaagtttgggaggaaaacagaacatatttgtgaagctcttgaaccatagtcatttcaataatgcatattaaccttatatctcaagataagacaagagcatacctgaatgcagaaagcaatccccaaaacattgtttgctagccaatgcttcttcgcagaataccatatgcaaaagaaaaatcctgggattgatgtaacaacttgagacttggtaaactccactgagagcgctgaaataagaaattaatgaacttaaaagggccaccaagacataagcttgtaacatgattcatgattgcaccaatctgacagatacacatgcaacaatctgacatatgatacacaattgcaccgatgattgagcatttaaaaaaaaagaggtttgggtcctacagacatacagtggaaaaatgcatcatgctgaacgatgaaattatcattccattcttttggaagaaatcatttcatggaaggcagcaatgttgcactgcatcagaaaaaaaaaagcacataaacaatcttaattgcacaaatacaatattacgtagttacatgaatggaaaagctactatatcatccaacctgccagcttttgtgtacatcattgattcattttcctaatgatctgcaacaacaacggtgaaaaaaatgattatagagatttggtgggggcaattagatgagatgaaggaaggggatattagatataaggatgtaccgtgaataaggcactactggaactcgccttcgatttagcacaacactaatgaggtaaattagaacatggacaaccagacaactaccctacccctgcatcagaaatatgaagctgcacagatgagcttttatctcagctgtcataagcagtgaagaaaatcaagcaaaacttgtaattgtaccaatgagtgagatggacagatggttgcacctcattaaaaataaaaaggcccaaacctcctgtccccacctgatgctggcctcctcccttgttccccatcacatcgctccagccgctgctgccatctctcccgcgcaacatgatcagaaatccggccaccctcactgcatgcaaaattgaagctcatcagaaacgactctgtgcaacaaagaacaaccaagcaactcctctgagcacagccttgccacctcttaattatcagtgcatagtgatgtacacattcatgaaacaaaaaaaatatccacagctagagaaacacgcaacctttgatcgtgcgaacacgataaaggatcagtcattttgtgcacctccattatcctcatatactgtgaataatagaacccgtacaaattgggatcgtgctgcatcagtaaagaatcggggatgagaggagatttcttcctgtaacttaccgagatggccactgggaagagccttggggatggggcttggacgccgccagccacctgcctcatgaccgctatgagcagcggaagcagcagggcgaggaaccgccaccaaggttgagcggccattgctgtcgccgattgaaccggtaatttttttctctgttgtgaaagggatgaacaccgcggcaaagacaaggggaaggaggatctgagacccttagcctccctgttgcagccgattcatccccttgtcatcgttgacaatggcggcaagctgctcaaggagagctcgattctgtgtccgctagatcaaccacaagcaaaagtcagtattgcttgagatcacaacacaaaatcatcatagctgcacaaaagacaaagattggcatcgattaccttggcccttggggcgaggcagcccatgagagtggcagcggcattgccggcgttgttctcctcaataaaactgattgtggagttcattacgagcagtgtgatgatgcccacgaagtcctgccagcccggcagcttccctgaaaacaccaaacaaatcaaccctcgtcaattcaatcaaacctctcacaatccctcacatgccatgctctggaacatcatgattcattaaattcattactacttactcctccattggcaagagcgatggccatgatcgccgcggcctccatgacccaggacagcgggttccacatgaacctcaagaacttgctttcctgcacacacacacacacacaaacaaacatgaaaaaaaactctgcaccatcgaatcgattcctaaacagaacaagaaactttagtgatggatgcctgggttagcctccaaacataaaggccattactatgaaagagctgcaagagagaaagcagttgcgggtggtcccagaaggcttggattgcacagattctaccagaggatgttgagatgctcccattgcaactcactgatggagaagaactggagagctcagctagagctggaggaggtggtagtaccagttccctactggtaccagtggtggcttgatcacttcaaattggagggactattgggccaaattcctctactgaatcttgggagagaaactacggattgggtgggtcaccttcttctccttgagcttgttggggccgaagaggttgaggcactgctcggcattggtggaggtgagccagccggagacggcgatcgacagcgacgacggcagtggcaccgcgaggcggaggaggccggcgagagcaggaggtggcaccgcgatgggcaggcggcggcgccgtcggcgtcggcgtcggcgggggtggagaagagtgttcgcctcctccctttctccatgttcacctcgaagcccacgctcggcggaaaggcgtcggagcgaggggaaggcagaggtgaaggcagtcggagactgcgacacgacggcggcgtcggtggaggtggaagcggcggcgcgagggcgaggcagatgtggacgcggtggcgcgaggcgacggcggaagtggcggcgctcgacggcgacggcgacgacggtggcggaggaggggaggcgggcgacagcggctagggttaggggtgagtggaccggcggcggaggaggaggatggttgagggagagggagagagaggaggagcggcggcggcgttcggcggcggcgcgagggggaggcggtggcggcgcgagactgcggcggcggcggtggcgcgaggcaaggcaggagagggagagggcgagacgggagcggggaggggaggggatgcaggcggcggcggctagggtttgggttagtgcgggtagtttagcgaaaagcccctcaagttttaagttttacagcgcggtcctaactcgcgtactttccttacttctcatgtaatatccatattttttaagggtctttacgaaaaataacacctcacaagtactattctcgggggactgcggacgaattacgcgtgaaccagagggctttcgcaaaaaaatacagtagaaatcctacgtggatacgcccagaactcaccccatccgccacacttaatagtctctaatttccagtctgtttgtgtgcgtttcttatcttatgagtaatgttggtcaatacagccagacagtcctgggaccggattatgtggtgccatatctcctggcggttgactttttatctatcgaattgttttactcctgaatctggtggagtatgtgtgaatggttaatacccgaatctcgtgtactttaggttcacaagaaaatattgatgacaagagcacaagattgacgtgtttctgcagtactaaaacttgtttttgggtaaccaggaggagcagcgaagcaaatctttttcggttccctggctatactcgtggagtgcaattgtaaaacacaaccgcaaaccaaacctttgaaacaaccaaaacacacagattccagggcacatcccaccagccaaggacaagtagctgtgcccttcgaaccacatcagaaaactagcaatcccaaacggagcaggacatcaacatatttccagagttgcaaaaaaagcagtatcacatacagcagcgaaatagcgtatggttcaaatgattgttactgctgctgaattgtcttcgtgggtaaccgagtggcgtggttcagctaagtcgctaccttatagttacaacttaggtatgttcaaaactcaaccacatagaacaaaaaacgtccctactacaagcggttcaaaattacttggccccacggccacgggcccttccaccagctttgacgcctttcttctggctcatgtatgcctttcccatcttccctttaccttcagctgaaaatattggtcgtacagtgaagagtaaatgagacacctagtagttaattagggggataaaaaccaagataaaataaattatagttgcatttaacaagcgaggtcaaattcagagtcctcaatcagtaatggcattcacaacatgaaaacatttcattggtccaattgtacagtgtgaagagtaaatgagacgcctagtagttaattagggggaaaaaccaagatacaataaattatagttgcatttaactgtgaggtcaaattcagagtcctcaatcagtaatggcattgacaacatgaaaacatttcaacacaaaacaggagaatgatgtccaaacattaaactaaaatttctataaaatggctgcatgtgcttagaatataaaaaaaccagcacatgaagatatatctataattctatataactagaagacactccagatagaaacaacagagaacatgaagatatatctataattctatttaactagaagacactccagatagaaacaacagagattaaaaaataaaatgttgttgaacccaatgaccaagttaactgttcacaacatgacaagttgaaaatttgaccagtttactattcccttcatccaaaagcttaaaacctattccttttgtcacgaataactcatccgtcatgtgacaaaaccaatgaaccattgacatacatgcagccaataagactattccttttgtcacgaacactaaggtaacccattcgacaaaacaaatgaactatatacataaatacagaccaatagatagcttcacaaacacagtgacttaacacagttaggcttattgaggaaaggcagcagcgtaccacccagagcggaggcctggtccctcctggccaccagaggatcgtcgaaatacccaactgcatgcaaataaacagtatgaggcacaccacaacgaagcaaaggtcatgtaagcaacgaggcacaggtcaggtaagcagtgcaaagaacttaccggagggcatggggtagacgatgaatgcgaaaccggacttagtcccgacgagcgctcctttgcggtagcgcgtgaacttgttctcgaacatgacctcctctgtgtcctcctccttggtggccatggcttccctgcaagtatcaaaaaagaaaaatcaaatcaaatcagtactaaaatgcatgagatccaaatccacgcccaccaaaacgcaatagcatacgagaaatcggcaagcaagagatccaaatccgcaccaaccaaagcaacaaatccgcacgagaaacaaacaaatcggcaagcaagagatccaaatccgcacccaccaaaagcaacaaatccgcacgagaaacagcaaatcggcgagcaaaagactagggagatccaagtcgcgaataccacttaaactcacagggaaacggatctgcaataacgaagaagcggaggccgaggacgagagacacacacagtgaaggcggcggcggcggcggaaggtggagaaatgatgctggtcgttccttttatacctataaaacctgggccggcccaaacctagtgcctcgtcttttgccttatgtttttatgtttgtaagccaaaatttaaattttctatcttaaatttaggccatgtttggttctataaaagttttactgttttcgagcactttttgctataatagatctaaacactagagttgattttagggttctttcatcgtagcttatttttcagcatttgcttttatatcgttaaaaacacgtatgtaaaaaatttatttataaattattttccgtttgcaaatatgccgtcaataagcagaacgatagagtcctaatatagttttgcgttgaataaaaaagaacatgttgcaccaaatattgaaaaaacaaaaaagaaaggaacatggatcaatggatggatagaacaccaaccaatctcgatagtacccgtaatatatcatttgatctctaatctaacaaagtctcgtgatcaaataacatatcatttgatcagagacgactttgtaagattggagtggaggcgcgaacgaggtccggcgccgccgcgcagatcgatgacgccggcggacggtggacgactgcggcggacgaatgaatcgagacaacttctcttctccatgatggatcgtggatgaatggatggacggactgaccgagtatatatagagccttcaatttggtgccttgtatatcgggtccccgtaacggaaattgaccatttaattcattctatttatttcaattcggtgccttatatattgggtcccagtaacggaaattgaccatttaattcattctatttattcgtatgccaaatcaaatcttcactaactaatttctttccttgtttcccagtaacggagtagtattgttattaaaacaccgcaatcagcgccacccaatcacaattaacaacacctacttataaggagtaccatagttgggctaacggcttggcccatggcccgtgtacgtacgcttagtacagatctgacaaattcgatatttctggcttagtaagttaaggctgcatttgatcatgcatattagaggttagtttttaggacgtgaaaccaaaaaactcattagcacttaattagttaagtattaataaatttttaaaaagatttattagatttttaaaacaacttctatgtagactttttattttgcaaattacgcaccatttaatattttgaaatatgtgctaacggagaaggagagagctgacgtttgaagttggagaaaagaagcatgcaatggtcattaatacatgtctcttagtcttactattaattaggaaaatatttcttcggtagaaaagacacaagaataggaaaggcaaacatcggttcaacattaactcttattttatataaaatgaaaatatggttgcacgaggatgaaaaaaaaataaaaaatagtaacaaaatatatatttttccatttaatgattacaatctctatatatgatctctaaatagggtgtgtttagttcacgctaaaattggaagtttggttgaaattggaacgatgtgatggaaaagttggaagtttatgtgtgtaggaaagtttatatatgtagaaaaattttgatgtgatggaaaagttgaaagtttaaagaaaaagtttggaactaaacaaggccataatcttgttcttatctctactttccaactcacctacctcgttttctgcgcgcaggctttgcaaactgctaaaggtgtgtgtgtgtatatataaaagttactataaaaatcatattaaccctttttcaaatttattttagctaatacttaattaatcatgcattaaacgctgcttcgctttgcgtgctagggacgatcacacccttaaacatgccctaatagcattcaacgaaataaaaaacttccttaaattttatcagtaatgcagtatatttttggccatgtatgtacaacaataacaataacaataatatgcctatatacggccggcacagctacgtacatactcccctcattttaaattaaaccaacctagaaaatgatttagtctgtgtattttaggttgatttattttaatattgaggaaatatgataagtagtactcccatattagggccgtgtttagttctttttcaattttttttaaagtatacggatatacatttgaattattaaacataggctaataacaaaacaacttacagattccgcatgtaaacggcgagacgaatctattaagcctaattaatccatcattagcaaatatttactgtagcaccacattgtcaaatcataacgtaattaggctcaaaagattcgtctcgtaatttacatgcaaactgtgcaattggttttttcgtctacatttaatgctccatgcatatgtccaaacatttgatgtgatagaatttttagaagtttgaagtgaactagtttagtttcacaccaaaattagaagtttgaagaaattgaaacgatgtgattgaaaagttaaaagtttgaagaaaaaagttggaatctaaacaataccctatgtgagtgtgacacatctaatatgcaatcaagatagatcgaaaagacagctacagtcaaaaacaggcaacagggcagtttcttcagtcagatatgatcgacgatggcagatgaccagatgtattgcgagcagaatttagagtgtgtttagttcacattaaaattgaaattttggttaaaattggaacgatgtgacggaaaatttagaaatttatatgtgtagaaaagttttaatatgatggaaaagttgaaagtttgaagaaaaagtttggatctaaactcgaccttagaatgacatcagtatatgaagtgtactacatacctttaccactagtaggctgtgtttagttcagcacaaagtttagattttgtttgaaattggagatgatgtgactgaaaagttacgtgtgtatgacaggttgatgtgatggatgtcacaccctgaagttctcctcccaagcttaaaattaaatttataaatgaccctaagaaaataccggtgcaaatcaagataaaaccctaagaaagtaatacaaataatacccgcgccggtcaccactcccgaaaccgctgccgccgcgccccacctcccccgctttccccgcgcccacgccgcgtcgcctgcgcccactccacatcgccgccccctctccccgcgtctcccggccgcgcctgcgcacgagaggggcgggattcaattttgaatcccctcccatcttctctctctccttccccacgtcgccggcgaaatcggagtatgacttgctgagtacagtggatagtactcagtcttgctctatttttcccccaaccccagagtacgagtatgtgtccgatggtgggttcttcgaggagtaggcttcatccgtgcagtcgaggatgcctatggagtgatgttcccgctgcagtttaagtcaaggcttagctcctgttacctttctttttcccgctgcatttatgtaagacttttataatgtttgtaagacgtggatctgtatgtcaacattgtcgtttgtgtaccccggccggtcctggacgggggttttaatgcatattctgcttggaattctattcgggaatttctgggcgtgacaagttggtatcagagccgaccttgaccgtaggacaagccaaatggaaaacctaagagccctctgaattcttttcattgcataagttctttgcaattggatttgttccaggaaaatttgggatctgttctcgtggttcaagggaaaaaaatcttgtcgctcgtttaagggaggtttgccaaaacaagtcggtctagggttttagtaaaattatttgagatgttttgaccgtcagtcgggattggatgggatttgatgggcgaaatgcattagttcttagctcaggaatatgagttgtaaggtatttatgcttttattgttattataagtatgtatctaatttccccattatcttatcgctatgtaagtccgtcttatttattcgctctcatgcaaaataatctatgcataaaatttcgctcttattcgattctcttatttgagtcctttattgctttatttaatttggatttgagcatgcattgatcctacccctttgtcttctctagatggccgagcacccacccaaccaccgcggagaaggcatggatgacttcgtggcagagttggcacgcatgacactggtggtgggctaccccaacgcgccggagtacacgactgttccaccgctcagtggcgagcttcctcaccgtgtccgcttggaggtccatggttacgtggggacttgcctcgctaacatggtggtcgaggcgtctggagccacagcagatcacgcatgtcaggaggcagcatatctgatgatggccagactgcgggagcgccacaactacatcttccacaacacggtgtaccgtttccaccctcgtcgagccaacgacagtgatgtcagttccttccgtccgacagccggcgagaacgacaccaccttcagtcacgtgcgctgtgatgagggggatggacaggatgcactcggacctgcacaaggcgtccaaggccttgaatgatgggaagctcatgaggatcgtcgctctgaaggacgagatagcgcgcctgaagagggagaatgctcagttgaagggtcttcccgcgccaggaggagtccagatccgcaccacgcctcgcaagtcgacaacggcacccgtgcgcatccagcttgcgcccaggaacccacctccgtcagcagctcccgcagcacctccagttccgcccgcagctccagcagttcctacagctccagcgccagccccagctcctgttcccgtgtcagctccagcatccgctctctccttcgcacctgcatcagccgtcaggggccccgccagtggcaatgggggttggttgcctgctactcccagtggcagtcgcgaccgcagcagcagcagctccagtggcatagagccgggcagcggcgagacttatctgccaggctccaggagtcgctcagaggacctggtgacgagcaggaggacgccttcaacttcaccgaccgcaggagccgttccgagcattaggctcgttttccattagcttatcgactgtctagcttctgcttgttagtttgtgtgtttaggttgcttgcttggggtcagttgacagtcgatatcatgtgcctatgatatggctgtcttaataaggatttttgcttgctgtttaaagtattttaattcagattagaacaattgcagtttaaatttctatataataaagcttagttcctgagtatctgtttttctccgtttccccgtctgctcttcctccagatggtctacaccaggactggcacccgcacgacaggcgagggcagcaacggcgaagaacgcgctgatggtgtgcaccccaacagtgattccggcaatggtccgccaccacttcccgagaatccgacgctagcccaagttatggcacatcagactcagatgatggcagccatgatgcagcagatgcagcagcagcaccagcagatgcaccagaggatgctgcagcacgctgaacagcagcaccggcagtttggtccccctccccctcagtccaagttgccagagtttctacgtgtcaggccacccaccttctccagcaccaccaaccccatggaggcgaatgactggctccatgccatagagaagaagctgaatctcctgcagtgcaatgatcaggagaaggtcgctttcgccacacaccagcttcaaggtcctgcgtcagcttggtgggacaatcacatggccacccgcccgccaggcactgaagtcacttgggcggagttctgtcgtagcttcaggaaggcacaggtgccagacggggtcgtggcacaaaagaagagggaattccgggcgctccatcagggcaataggacagtgacagagtacctccatgagttcaatcgcctcgcgcgatatgcaccggaggatgtccgcactgacgccgagaagcaggaaaagttcatggcaggtctggatgacgagctgaccaaccaactgatatctggggactacgctgattttgaaagactggttgacaaggcaatccgtcaggaggatcagcgcaacaaaatggacaggaagagaaaggcggcacagttccggtccaaccaaggaaaccatcagcgaccgcgtttcactcccggacagcagggtggacctaccaccatgatcgtccgccagcaccgcccgttcaactccagcaacttccaccagggcgctagtggcagtcagaaccaccatggaggtcagcctaaccgcggtgcagctccacgcccaccagtggcaccagcacaatcaggcccgtccgcacaagctaaggagaccgaagccaaacctgggtcctgtttcaactgtggtgagcttggccacttcgccgacaaatgcccgaagcccaggcgtgccgggccaaggtttgtctaggctcgtgtcaaccacgcgtctacagaggaggcgcaagcagcaccagaggtcgtactgggtacgttccctgttaactcaatccctgcaacagtactttttgattctggtgcaacgcattctttcatttcaaagaaatttgtggggatgcatgggttaaggaaagaagagcttagtacaccaatgagggttcataccccaggaaatagttcaacctcagtcaattttagcccttcagtgctaatagaaatccaaagatcaccatttctagccaacctcattcttctcgaatccaaagacctagatgtcattcttgggatggattggctgaccaagtttaagggagtcatcgattgtgcgaatcgcacagtcaccttgaccaacgagaagggagaaaccgtggtgtacaaatcactagtctcaccaaagcaaggggtctccttgaatcagatcgagatggaaatcccagtggtcaccgaggagaagaattcgaggaagttggaagagattcctatagtctgcgagtacccagaagtgtttcccgaagatctcactaccatgccacccaagcgaaagattgaattccggattgatttggcaccgggaaccgcgccaatttacaagagaccgtacaggatggcggccaacgaattagcagaggtcaagaagcaggttgatgagcaactgcagaaagggtacattcgaccgagtacttcaccttggggtgctccggtcatttttgtggagaaaaaggataagacgaaaaggatgtgcgttgattatcgcgcactcaacgaggtcacaatcaagaataaatatcatttaccgcggatcgatgatttgtttgatcaactgaagggagctaaggtgttctctaagatagacctgcgatcaggctaccactagttaaggatccgggaagaggatattccaaagacggctttcaccactcgatacgggctgtatgagtgcacggttatgtctttcggacttaccaacgcacccgcattcttcatgaatctgatgaacaaagtgttcatggaatttctcgacaagtttgttgtggttttcatcgacgacattcttatctattcaaagtctgaagaggaacatgagcagcatcttcgtctggtactcgagaagttgaaggagcaccaattatacgccaagttcagcaagtgtgacttctggttgacagaagtcaaatttctgggtcatgttattacagctcagggtgtggcagttgatccatcgaacgtggagtcagttaccaaatggaccccaccgaagaccgtgtcgcagattcgaagttttcttggacttgctggttattaccgccgattcatcgaaaacttctccaggatcgcccgacccatgactcagttgcttaagaaagatgagaagtttaaatggacagctgagtgcgataagagctttgaggagctcaagaagaaattagtatccgcaccagttttgattctgcccgactagatgaaagacttccaagtctattgcgatgcatcccgccacgggcttgggtgtgttctaatgcaggaaggcagagtggttgcgtatgcctcgcgacagttgcgtccacacgaagggaattatccaacccatgatttggaattggcagcagtggttcatgctttgaagatctgggggcactatctgattggcaaccgctgtgaagtatatacggatcacaagagtctgaaatacatcttcacccaaccggatctaaatctccgacaacgaagatggttggaattaatcaaagactatgatatgagcattcactaccacccggggaaagccaatgtggtggcagacgcattaagcaggaaaagttactgcactgctctatgcatcgagggcatgtgtgaggaattgcggcaggagtttgagcatctcaacgtgggaattgttgaacatgggttcgtagccgctctagaagcacggcctacgctcgtcgatcaagttagagccgctcaaataaatgatccggaaatagcagagctgaaaaagaacatgagagtcggaaaggctcgggatttccttgaggatgagcatggcacaatctggatgggagaaagattgtgtgtacctgacgacaaggaactgaaggatctgatactcaccgaggctcatcagacacagtattccattcacccaggcagcactaaaatgtaccaagacctcaaagaaaagttttggtgggtcagtatgagaagagaaatagctgaattcgtcgcactctgcgatgtttgccagcgagtgaaggcagagcatcaaaggccagcaggtttactccaacctcttcaaattccagaatggaaatgtgaggaaattggaatgaactttataacaggactgccccggacatcattgggtcacgattcaatctgggtagtcgtggattgactcactaaggttgctcactttataccagtgcataccacctatacgggaaagagattggcagagttgtacctggcaaggatcatgtgtttgcatggggtacctaagaagatagtatctgaccgagggagtcagttcacctcaaaattttggcagaaactgcagaaagaattggggacccgtttaaatttcagtaccgcctaccatccgcagacagatggtcagaccgagcgagtcaatcaaatcttggaagatatgttgagagcttgcgctcttgacttcggtggagcttgggacaacagcttgccatatgcggaattctcatacaacaacagttaccaagccagtctacagatggcaccgtttgaagctttatacggccggaagtgccgcacacctctcttctgggatcagacaggcgagcgtcaattgttcgggacagaggtattaacggaagcagaagagaaagtcagaaccatcagggaaaggttgagaattgcccagtctcgacagaagagctacgcggataaccgccgaaggaagctcacttttgaagcaggggattatgtgtatcttcgggttaccccgctccggggagtgcaccgttttcaaaccaaaggcaagttagcaccacgtttcgtgggaccctacaaaatcttggaacgaagggggaagttgcttattagctagaacttccatccaacatgatcggcatccatgacgtgttccacgtgtcccaattaaagaagtgcttaagagtacccgaagaacatgcagattcggagcatattgatatccaggaggacctgacatatgtggagaagccggttcgtatacttgataccagcgaaagaagaaccagaaacaaggtcaccaggttttgccgagttcagtggagtcaccattcagaggaggaagcaacctgggaaagggaagacgagttaaaagccgcccatccgcacctcttcgccagctcctccgaatctcggggccaagattccgtttaaggggggtaggtttgtcacaccctgaagttctcctcccaagcttaaaattgaatttataaatgaccctaagaaaataccggtgcaaatcaagagaaaaccctaagaaagtaatacaaataataatcgaatctggcatgtggaatttttcttgagttctacatgtcgaaattcactaacaagatttttagtggaatttttagagccctagaaataattttaaccaattaaaatggagcatgcaatattttaattccagggaaaatccttttctcctttttctttttctttttcccttccctttccgaatgggccgccggcccattctctcctttttctccccctcctccccgctgggccggccgcaggccgaggcccagccaggccgccccgcctccctcctctcccggggtcgccgacaggtggggcccacctgtcgggtcctcccccaacctcccgccgccgcgccggtcaccactcccgaaaccgccgccgccgcgccccacctcccccgctttccccgcgcccacgccgcgtcggccgcgcccacgccgcgtcggccgcgcccacgccgcgtcggccgcgcccatgccacgtcgccgccccctctccccgcgtctcccggccgtgcccgcgcacgagaggggcgggattcgattttgaatcccctcccatcttctctctctccttccccacgtcgccggcgaaatcggacgtgctcgggtcgttcccgaccttcccgcccctataaaatccatccccgagctctcctcctcatttttccttttgccgtctctctctctcgagctctccatcgtccccgcgccgtgcaaccactcgccgccaccgccccgctactccggccgccgctagccgccgctagggtcgccgccgcgccgcgccgccgtcgccgtcgggttcgcgaggccgaactccacctcgtccgccccttccccgtcgggattcatcgccggaattcgcatcccctcgcgctccggtgagttcaacctctaccgccgccttcggccatgaatgccggtcgccgtggttcatctcccttcctctaatctctcttctccttccttagggcaccccgaatcccgtccgccggttgccgtcgtcctcccgtggctcgccgtcgccgtcgtcttcctccgcgccggccaccctcggtgaggcgtcctctcccctctattcccctccctttcccttctagccgccgctttagcgccgccgcccgttagccgtcgctttagcaccgccgcccgtcggcgccccctttgcgccgccgcctccgccgccggttgccgtcgccggcaacgcgtgtgcgcgcgccgtcaccgtcgccgtggccgcttggccggtcttgagccgagccgggtcgccaccgcccgtccgatcggccccgagggcgatctgggccgtcggtcccgtggaccggcggtggaccacccgcgtggtcccggtcctcggtgaaccgtcccccctgagccactgccgagtgggctcgcgtgccggcacccctttcctccctctcccgagccgctgaccagtggggcccgcgtgtcggcgccgccccaccccgtgctgacgtcaaccctggaaggctttattgcgcaataattcattagggtttttcttttatagtaataaacacagtgaatcttctaaaattcataactaattcatccgagctccgtttaagtccattcaagtctcagtaaatcaagaaaaatgtgtagaatccattaaaaatggttttgttccctgtttcagtagtcttatagcctgtttgcattgtttgccttgtatgtcgttagattccggctcttctgacgctccggtgtacttcgaaatagtcgccgaggttcctccagcagcagagcaaggcaagtcatgcttgtcacttgatcatgttgatcctacattgcaaatgttctattgttttccttcaaatactgcatttattttgcaataacactatggtatgattatctattgttacagccatgctattttgataccatgctcctttgttagcttgggttataacatgaatagactttggactaggaattgcttagccatgcttagttccactagcacacaatggggagatctcattaaaatatagactttaggttcaattggtaatgttggtttagtatcaccattttggtgttggttaattaaaatgaatcacatggtgggctgtgggtgcatggttttgctggtcgcacccatggcatttaaggaccggttcgcgggaaacactggaagaacttatcgtgcttaccacaagccagcgtgggcaacggctgggcttgtagtataacttttctctagctgacgcatccaggcaagggtgggcgtgatggagtttggatgggccctgcgacggcctatgtggcttccggattcacctaggcacgagaggggactgcccgtcgcccgctggggacgggggtgaaacctgagttgtggtgtgcttggctagagagggttatgcgaagggtcctgtcacggcctctttccggtatgtcgtggtggcatgtcggcgcacggaaacgtgtcgtggggctatgtcttgtgggtacagttgtacacctctgatcagagtaaaactattcgaatagccgtgcccgcggttatgggcggtcaaccagactcaccgtgattagactcatcttagtttagtctaatgaaattggatggtataggtggatggttgggcctgttgcaacatggtggaacgttggacagtggatgattaatactacttaattattacaactgttttcgcatacgacttctgtttataaatgccagtattgtgcaaatgaacctgtttagctctcccttgttaaatccctgcatcataccccccattccggtatgacttgctgagtacagtggatagtactcagtcttgctctatttttcccccaaccctagagtatgagtatgtgtccgatggcgggttctgcgaggagtaggcttcgtccgtgccgtcgaggatgcctgtggagtggtgttcccgctgcagttcaagtcaagacttagctcctgttacctttctttttcccgctgcatttatgtaagacttttataatgtttgtaagacgtgaatctgtatgtcaacattgtcgtttgtgtaccccggccggtcctggacgggggttttaatgcacattctgcttggaattctattcgggaatttctgggcgtgacaatggaaaagtactgaagtttgaatccaaattttggatctaaacgcagccgtagtagagttttttttaaagaactgtagagttctttaccacgaggagtagtgctagtagagttaactaatatcagaaccaacatgtataatactgtatcttctagcactcaatctttccctccatgtttcttttaccactcactctttctttaagttgggtataaaattatctccatgtttctgttagcactcactctttctcttacttaagaatttaattaatgtatttaacttatatgtaatgctaactcttacatgagactgagagacaacaatatatattttcctttcttaatttctctcctttacataaccttctagcccactattatcactcgtataggagtacagaaggagacattcctatacgatctccgtttggcagagcatggcaaagcaggttcagctgaaaaaatatctcgttttttgttagtcagtttttcgaactgtttaaaaaatcacatcaattcatttttcaagttggcagccgctgaagtacacagattgatcagcacactaagacaatcggaatgattgttttttagtatactcaatgagtacggtcctcagcgagttcggttcggagatgcatttgataatgtaatgataaaaggtgtacggtttctaatcctaaagtctcgtgctaaattcttaacaaacttataatttactttataaatattggaaaggacgtctcttcctccgaatctttctttttttaaagaatacataagggctcaaggctcaagggacatctacgtactagtaacattttttcagcaaggctgcaaaatatacatatagatgtatatatttgccggttggccctcttcatacatacataggattagtatagcaatatcactcgtaccacagataatcttctactactccttacgacatgtcaggttaattatttcaccctttctgtctgtcgtttttatttttggtgctaattgctcctccgtatctaaatatttgacactattgacttttttaaataagtttgaccgtttgtcttattttttaaaaaagtaattattaattctttttctatcatttgattcattgttaaatatacttttatgtatacatatacttttacatattcataaaagttattgaataatgcgaacggacaaacatgtttaaaaaagtcaacagtatcaagtatcaaatattatttagggatggaggaaataacttactgttcggaaggctacaagagagagagaaaaaaaggcacacgtttaagcaatatgtacatgatgttaagtatatcgatctgctacacaggaagctagcgtacatcgatctatgtagccaagataataagctaacctagttaatttctttccgagttgtacgaaagcacaggtattttagctaattattaaagaaataaaatcccaagctaattaagcatacagatatatatatgttgttattaatttgttaatttgacagtgcacaaacgcatgcatcagcccaatatggagtagaaaattaacacatatataggtaaatctgagatatagtaacttactagcttagatagaggacttccaatccatcgccgatctgtggatccatcgagatttgtattaggtatagcttcagatccaaagaagagaagcagctagcgcgctgagctcgaggtaggtagcttgcttagctcagggctcagcttcgtcaagctcgatctgtgcagtctcgatccggccggccggacggcagcagggagagcacccaccatgggccatggccagcttgctttgctagctacaggtctcaggtgaggctgccggctgccatggccagcttgcttatgccggatgcgccatggcaggcagcaggcatggtgggtggtgggtgcaggtgagaagaggagaggaaagaaagaggcccctgcagctgcaggaagaagaagatgaggttgtttggtttgctttggctgctttgcttgcatacttaaatttggtgtggctgtggctgtggctgctcgctggtactggtgggtggagtggaaatggaatggaggactatttatactatattgattacactcctaattaaccctagccgtgctactgccactgactgctccatatggagtactgtacagtacagactctactgcaatactcctactatactccacggccgccctgagctttgattttttttttcttcttgtcgacactgagctttgatttgactagtccacaccccatccatgggtcccaccaatgtcaaaagctgctgtccctcccttgtgcttttgtttccttcatcgatactactgtaaatttgccactccgatccattcatccatcgcgccgtcgacgatcttatccttgccaccgctggcaagctcctcgacgatcgctgcaggggctcgccggcggacgaatggaatcgccgacgcaggcacggactgacgactgtccaagcagaaacggaggtctcgctcgctggaaaagcatcctcccaacataatttgaaaaaacaactcctaaatccttgatgaaaacctctgcatgcttctttccagatcacgatttcctctttacttgtgccaaagagctaggtaagccgccgatcgcacctgatttaatttggagcatccaacacacaaagaaaaagcgtgtcaaagaccctcctgtagctgatacgaaaatcaagtctcctgtagctgatatgtccctacctgattcggcgggcacttcactcacacactagtattatgagtcatgtactagtattatgagtcatgtgtgatagatagatagatagatagatactgtgatgtgtctgtctgttattcaagaaaccttcaaacaggttcaactgcatgtgccttcgccttttttttgctttgctgatcaaacctgcatcacaaaatgaacatgcattttctagtaattgcagtgaagaagcaaccatacaatcaactgaagagaggtttactactgcagttgctttcgcttttctcaactaccccctccgtcccaaaaaaaagtccaatcctagctatgaacctagatatatacgtgtccaagttcatagctagggtttggttttttttgggacagactagtatataggtaaaaagggttacctgaataactagtgtgacacctggataattcattccccgtgttgaaatatctgaggccaccagatcaagcgactagaatctcgaaattcttctaatatccgagttctatagtgctgaggctttcttgaatgaatttctcggacatttagcttcaaatctcgaagcatgatatacataaattcagtcatcatggcagttgtgcagaaaacaattaatcacctgggatgagaaaggctaagtaaatttaacttatttaagttcttagtcaatcatattgcctggtcaaaagagggatgagagcaccttatagtccacttcctgatcaccttataggctataaaccatatgaaaatgctgctcgtgtggcaaaacgagataaaactgctccacataagctcaagaacaccaaatatcaagggaccagtacgcaactaaaattcatttccatgggagaagataaaaaagagactatcgtaacaatattttacttttgagctaaaaatcattagaaatatagtttatattgccgtacaaagtgtacaaatgtcttaaatagtcaaatgataaacacaatgacaagaaagacatatggtctagaatatctatttatctggatgtcggcatctataaacaaaatgttttacagacacccctgtttgtgcatccatggaaatcaaaagtgctgaacaatgccgacccggcaaaagtgctgaacaatgcacgaatgacctaatggaagtcccttccatagatacaataatgcaaatgtgacctcttttaattggcacattaagatacatgctaacagatgctctaggtaatgcaaactaagaaaattgatcacagcacatttctgtacttgcaggagtcagaaaaaatgagcatattgcagatgagaaaaataaaagattaaggtgatatataatactaaatatactagagtagaactggaagcatagaccttagtaggagtttcaacagctcccaagcccattgtatcaacaaaaacatcatccctttttaaaactagttgcgaaacccttcgaacctttcattgacaaattcagatatgtggttgtcaaccaatacagaaacagatagataaaaatatagagactactagttctgttggccatgctgattacagtaccccttttgggagtagtgtttgtctttgacgtagcaaactatcaacaatcttttcaatgtctgtaagaaaacccaaatctagcaaatgaacagcttcatccaatacaagcaactccaatcccatcaagcgagcagataataaaaatttgttctcaatgtgatcctacagtctaccaggtgtaggctgtagcaactaaaatcttcaaggggggaaacacaagatatagttcagacaaacgacaaacagttgtctgtacatatcaagcatcagttacagtgagtgcttgtactgatgtcaatgaaacagcacaacttgtttgttagtcacatggtctgtatctctttacgcataaagtaaaaatgtaaaatcatctatcggtcattttatcatgatgagtgatgctgaatactatgttctttcattttattattgttaattcttgttgtacatcagtgcaataaaactgtaactccaagaagacaatctgtaccaagtaccaacttcttagttcatataccatgatacgtacaaaagtgcatgactcctcttcgctggaagctctaaatttcgcaaacctcaaatcattctttgatgtttttgttatatcttcatcatcctgtcaaatcgccctgctgccactgggtacaacctctctttgtttagcgaggaatagacttcagagctcctgcctttgtacatagttttttttccttttgcttttgtttcgctttgttttcaaggcttctcgccttgactcgacattctaatatcgagattcatgtattttcttccaatcttaatgaaatttagtcagcgtttcttccgccgacccatcaaaaggtacaacctctctttgattaaacagggagggagaaatccgaccactggaagacctctagagataagcagcatcagcatcatcgatgcatcaccatgcacctggaacggaggaataactgagcagcatctcttgggaccaaagaaacagaaagatgcctctgttcgcaaaggaatgccagaagccaaactccattgcctccaccagcacataaattagactccaaacttctctgatctaccttgaatcttagtgccaccgataagattttgaactacaattcctcgatggtacttcaaccaaacagttgcctttgcctcagcagtgagctggatggcaagctctcttgtagccttgtagccttttagggcagaaggataaggggaaaaatatttcatcggaaaaaaaggaaaccggaatattcataatatactgcttaaaatatgtcaggctactgtcctgaaaccaagattcaatgtgtgtgatgatacttaatgtaatacattttataattaaattcgaattccaaattaaacaggaaagtcgtagcattagtctctccacttaacctcctgtccacacatcaacaaaagctttcgtattacactattatatttatatgcaactaattttaaaatttatgaaaaagaattaaggggcaaaaaggataagattaagaataagggaacatatttcattaaaaaaaagggataccagagtactcagaacattcaaaatatattactattgtatagcacatgcttacattacatatgtccagtccatgctactggcctaaaactaagatgcaggaaacaagagaattttaatgcatgccttgaaacatttgaaactggggtagttcatagccaaaaaagagaataaacaaaaatattcagaacattcagcatatactattgctactcagcaaatcacaggaattaagaccggaagtgaattatatgaggtgacgccatcaccttagctctgatctggatggcaagctctcttgtagtagggcaaaggataagggaaaatatttcattgcaacaaaaaacaaagtaagcaggaatattcagaacattcaaatatattaatattgtatagcaagctttacatacggcctggaaccaagttgcaggaaacaagagaaatttaatgcatgccatgaaacgattggaacattcagcatatattattaccagtaccatacagtgaatcacagttttgcaccgagcaaaattaagaccggaagtgaactgcatgaggcgacgccatcaccaatccctctgtaatttgcttcctcagcagctcctgctcctcgatggtctgcggataccttgacggagcaaccttgatcttgggatccaactcttcacagcacttgagcaccttcctgtcatgcagggatatgttctctaggttaaccgcagcttccatgacgtgcctgatgtatcccataaagttctcatttggttggaaaccatagatggtgagcttagtcaggttgtaatgcctaaaaccatcaggtgcggatgactcccattccacgtttgttttgtcacagtaaccctgtttttcccgtttcaccttgtctgtctcaatctcacaccaatggtcccaaactgtgatgcacatctccttcagggagggtgcagcctcgagaaagaatcttgtctaagcgatatcacattcttctgggagttcatccagactcaaaacttgcagattctgaagaacaggctccagcagttttgggcactccggatgaacccaaatctgcaatacataccaataataaaggatccagattaagttgagaacgaggaacaaataacatgggagagaggattgcttaaagtaattatcttttcacttgcaaagttgaggtgcaggtcttttacgaagaggatattagcgaggaactgacttaacctaataaccttatgccatctcatggccacattagtgaggcttaggcttgaaagcaatgggacgttgcaaaaagacaaggttcttggggatagacccacacaccaaaacccagccgtttgaggttcggtagggagttgagctcgattagttctaagttggcattggagatatcaagctcaacaaggcgtgggtgttccaactacagcagcaatacgctatcctcagtttgacacaaggccaaacgcagatactctaaccgtttgcatgtggcgatgatgttgggaatgtcagtttcagcaaagctttaagttgcgtaggtggagacgtgtaaggccggcaaatgcatcagtacaggaacaaaaaaatgtcatcagctgcttcccatcgcggcggcgatcatcaatagttgaatagtccggcggcttctctgtcagaatgttgaactcagcgctgtggatgttgtgggtggccatggctcgggcaacagccttgccaatggtgagacaatcatagtatctcaagtagaaacctatgctgagcttgcgaaggggaatatcttgtcttctgaaactgagaatgttgtcagttgcaccagccacagcagcgttcatgggaattgtatccttcaaggtggcatagccacaacggggcacaaaggaattgatccgaatatgtaagtttgagagcatatggcggagatggagtgtcctcttagaaaggaggcaggttctgacagcgtcgggggtgttgaggcggtccaggatgttgagcaggacatcttcaggtagcttggtgaacccatccagcatcacgggatctgatttctgcatcaagatattgcagcaacccactagagcatcaatccatggatcaacagacaagagcatcaatccatggatcaacagacaagagaagattgagagatgcaatgcaaattaaggaagaggaagatgtaatgctgctcacgttgcggttgcaacgactacccttcttcttgttcttcatgggctgtctagttccgatgagcgaggtcaagatcgaactggcgacttgcgtcgactacctttccaccccttgtcgttcgtttgagacaacaaaaaggtcacactttgaattcaatcaatcgaagaagaggcatgcattcgcggcaatggtggtgtggtggcggaggacaagggaagaatggccggcgttaatggaggaggcggcggcggcggcggcggtggcggtggcggcgatggtagggaggattggggacggcgacgttaggttaggtacccttgttattatgggcctcctctcgaatcatcttcctaattgggctagcccattgtgtctgattgggcctttcaaacaagagatatcattggcatatagaaaataagtctactttgcgttcatcatctttcgtcccatgtcatcctcgctctcatcacatattttctcttcttttctctccatctcttgtcggcaaggagcagtagtgatttaataatatctaagtctgatgatatgcgagctcacgctgcgctaacagaatagacatgttaaaattagctcattcgaaccttccgtttcatctcttcatcaatatatatgtttggtgtttgagacttctgcaccgggagatcatttatctcatttcagaaatactcttcccatggggcaaacaagggttcagatttgttcttgtcatctctgacgtcaagtgacgaggacatttcaaggcatcttggttgctttacattaaaatgacttggctgtaaataacggttactataaaaatttacattagtattgataattgcttaattggtgaagcagttagctccttatttatcacttgggacttgggagacaagaatcgtgtcagcttattcacatatagcgtcacctaatgtggattatttccaactgaacattttggttgcagatgatgtcaaccagggattctttgttcatgcctgcttcatgcaatgctttatgcctccctggcaaagtatcttcttgcaaatgaatattaccagaaaaagctgcacttttgccggttccaattttagccttgacaagtacattttcacctacatgcatacagtgatgagtgaggggcaacctcttgatttcttgaaggtttcaatcatagcattttgagctagatcgagagatataatggtaccacaaggtgctaagtagcaagtgtggaactactgaagcaagtagcatgatctgtataaatttgtggatggtaacgcatattccaatttccaatgaaagaaaaaaaaagagtgctttcaagacacataggaaatgctgtttcctgcacaccagtagtttgtacatatccagcatcagtgagtgcatttactgttagcgcggagataccacattcatcaaatttgatgtcaatgaaacagcacagcttgttaatcacatggtaagtagtaaccatctctgttttgaagtacgctaggaagcaatacgcataaagtaaaaatataaaatcacccatcagagtgtcagtcattaaccgcaagttaaaagggcatctatcattgttttcttcctcatatcacagttcctcaaagcagaacttcgccatttcttcctgatggcacttctcgcctccaattcatcgtctgctgactcctcttcgctggaagctccaaattttgcaaacctcaaatccttccttaaacagggagggtgaaatccgaccactggcaagaactctagcaatcagtggcatcaccgatgcatcgctggactcctgatgtctcttgggactgaagagacagaaattaagatgcctcactaagcaagaggcgagcgtcaacagaggtgccggggaggagcaggccgccggcgcggtcgcaggagagggtgccgaccggaggcagagacgaggacccctaggacatttagtagcaaaattgtgaggttgaatgtgcataataggaagtttgatgcatttagtgttctgtgttttttagcaacaccctattgcagagaacaaaataaaactatctcattgttagcttcgctaattatgggcaattttctggtttatgtttcacactacccagagttgcagtatcaactaagagctatattttcctatcaataggtcactcttgtcgtcaaacactttgatgatccaaggatagtgagtgcagacttgaaagatcttcttctttttcttcaatcaatatcggttcttgtacagtacaaagaattcatgtttctatttgagaacaatcgggaggctataaacagaatgccaagatcacttctgtcagcttttggtaatagatcatggatacctattaccaacataccttttcaactctgcaaaggtttaggttttgcttcatccaagaatgctgaatcttcatcatctgcaactttccaggtttactttaatattacaatctcttttgtaattatattcattcttctatttctgttgtgcttatgttaccgtctgattgtgtgagaactatctatttgatcttacatttgtttttctctacgaatgttctactcagggagacatgtattcatgaagagaactgtttttatcctttctgaatcgacttttcaacacattaagttggacaatgacgaattctccatgtccatccgtgagatgcaagataagcaccgggtggatttttttttgttttatattcctcttggtgcagaacttaaactctttgctgattaatgctttagtactcgggttacattttcagtttagttactaaacgccatcatttttcacatgtcaaaatgcattaaaaaaactgaactttatcttagctctgcaatgaaggtatacactaacaggatccttccttttttctttggagaacactaacgggatctcttgacaaggataaattccagtaatttggttgcttcagttaattgctttttcaatattttatcccaaggggggaaatctgtgtccgtcccgggtgtagccatgcatgtggaggtaaataattgtaaccaatatttttcaggttgccgatttgcagcaaagaaagtgcagtgttattttttacatatcagtagtcttgcaaggatcttggagttctgcgccagagagatccctcatgcgttactcatggggacagatatgaatctgcgaagattgactgaattaattgtatttattctgaaccacatcatatcagcaactaatgcagagtggttttacatgcaagtccacatcttaatctgaattctgaagtctgaaaattagcagtgttttagttattttaagttgagacggtgatcttgaaaggttgctcagtttagcgtcagaatctaaaacgcactgcttctattgttgatttgagctaactcaagtataaaccaatattgttatatcatggtatctttttttccacagtacagttgtagaatcgcacgagaccaaacaaacctaccagagggggtgaatggtagggaaaaccaaaaacccaaaaatcttttatggaattaaagattaccctcgaacgatgtcgatgacgaagtccagtcgccgccggtcgaaccgcctacctgccgccggtcagaccgccgctatctcaccggtcagaccacgcgcacacatgcagttagaccgtcgggacccagaaacaccggtagatgacaaactcgaagatatagattgaaacttttcgactttattgcatcaactagtgtttacaaagtgcaccaatagcactcctcaccaaaatcttgaactaaactcgaaatcctaactttctctcaattctagtctctctagaatcgataccaggacctcaccctccctttctatttatacaaaaaaatcccctactctatataactcctataaataggactcaattcctcaatttcccttttctccgaaactgcagccgcaccggccatctgaaatcctgctccgggtcggactccttcggatggatccttcgccagctcgcactcggtctcctctcgccgcacgtcctggaccggctccagcaagccgcgcgcctgcccaacctgctgtccaaccgaagccgctgctgctgcctgagccgccaacacatgcacagcacaacatgcatgcatcgatctccatacatgcacagcacacgtgcatgctacatccaccgagcctacacacacatacatgtatcaacacatatatgcatgcatatacttctcaccgatttcttccaatctccttcgcgaacaccgacgcttgcacgcacacctcgtaaaacccgttgcaaagatctctcccacatagtgtccatccaccgtgtgccatctcgtatccaacttcgtcacccgacatccttgaccgtctggacctcaactcctccttgagtttagtcccgatcctcaccgttaccgaagttgacctccaagaatcctgactctagtcaccttctcacatggtatcccgatcgcactagacatctgttcctccctgaacatagttccggtcctcaccattgaccaaggctgacctcaagtcacatgcacacaatcagacaaaacaaccgtttctgggcacagatatcacaacctgacccacattagtgacacgcactcacaccaacatccacacatcttttcaaaccaattcatcgattaaatcatttgcatagccaattgttcatcacaaatattaatcatgacaatgatttgacagtacaccaagatgcttcctcattttatcggtgcatatgataatctttaatgtactaaaaaaatgcatgtgcgttacaatgggaagaaaagatgacaaaattgaggagaatttgagaaagatttacattatgtaattaacttaaatacacatttactggaatacttgatttttttaagtaggtaggtgtttaaattaatttaaaagtaaagtaagtgtggaaataaaatgatatggctgaatttaatttttatgaagttctccatgattaattacactctttggaattttcttgaaattttcagatctcaattgctaattttaataatacaaaatcatttcaacatttatttaaacgaaaatctaaataaaaactctccattatctatgggccaatttcagcccatttccttcctcagcccgcagcctagctggcccacttttctcccttctcctctcctctgcctcggcccgcaagtacgcatccggcccagcaaggcactacaagtctaatcagactccctcactccttccctcactcctttcactgtcatgtgggacaatgctacagggtcgtctcctacctccgtccgtattgcttcatctgcctgactacgcctgaatccgcctctttcgtgaaatacggccacatccatggagataatccgaaattgactgaggggttttgatccttatcttctactctttatgttttttcaagaatcaaagcaaaaccacatcatcgtatagatgtcggaagggaaaccagctttgtgctctgagtttgtttctcttcaaaaccgcccacgcacgtgctgagagggagggaatcggataatacggacgaaaacaaatgtgactaaaggaaaaatacaaatcttttaattaggtgtagataagtatatgtcaatgttatttttcttcagttgtatatgtcgacgtgccttgcacgtgcacgttcactagtagtatgctattttacctactctaataacatttgtctcgtcttcttacaaaaccatcataatgaaaagttttctagtcaaaaccatacatctaccgctactttcataacactttttcacccttgttgtcaaagccatacatctaccgctactttcataacgttttttcacccttgttgtcccagctcgaaggattcactgtgccaggtaggccagggttccccgacgcctggctttttccaatgccttacacttgtctttcacagatgtgaattctcttcttagacatgtgcacaacaaaaaactatcacacttgcaaaacaaataacttttgaactttctagtcaaagccatacatctaccactactttcataacactcttacacccttgttgtcccagctcgaaggattcactgcgccaggtaggccagggttccccggcgcctggctttatccaatgccttacgcttgtctttgacagatgtgaactctcttattagacatgtgcacaaccaaaaactatcacaaccaaaaactatcacacttgcaaaacaaataacttttgaacttgtaagcaaaaaagaaaaagagtgatagcaatccgttaaaaaaatttgtttcaatgatttttttactgtagactattattactaataatagtagtgatattccactctaaccgcttgtccctacggattcaactgacactcatgtagagtgttggcatactaagattcgtaaagtaagacaatatttaagaggttggaacaaacagactagcggtatttataaaaaagagaaggtttggtgagaaaaaacttaattttgttggtaaaaaagttttgattttcttgataaaaaaacataatcaacttatttggcttattataggctttatttgaggaagaggttatcctatttgataaggaagaggaaattaaatggtatcaacgagctcggactaaaaatattttggaatggtactcgaatactaaatattttcatttggtagtaaatgataagtatagtaaacaagcatttcttagctacatgatggtgatcgggtaattaatggtgatgcgaatttaaaggcgcatatcaccatttattataaaggtctttttggcccttatgaagcttcttctttaacgttagatgaaagccaaataagtgatattccccaggtttcttctttaacgttagatgaaagccaaataagtgatattccccatatttctcaataagagaataatgctttagtacaagatttttctgagaaggaaattagagatgcgacttttcaaatggaacataataaagctccgagttagaatggattcccagctgagttttatcatgttttctggaaagtaattaagcctgatttggttgatttatttaatgatttttatagtggtaatttacctctttactctcttaactttagtactgtcacgccccgaactagtcccgaccggaactagcccgtgacgctccaatttaacctgttaatcgataccagtcccaggaaacagtgctggtatcacagggagacagaagatcacagcaacagaggtctctttattatagagtagaagtacagtcatgttgggctgcggacagatcccgagctcacaactgcattacaaaagggaaacggaagccaggacttggaccaaacacacaggcgcgacttgggaactaggccgaaaccctaaaactcatcgtagccggcttgctcctggaagaactcctcatcagcaggatctgcttcatcttcttcagcaactggggggggatatttatatagagcaagggtgagtacgggagtactcagcaagccatgggaattaagtgtttaatgcaggcttcaaggaaaggctgttgtttttgcaattgattttatttgaactctttttctaaaacaactaggtgagtgcttctcaaacgacacggatgagaccgtgcgtctcgtccggtcggagtatgtgcaatgtgtcagttctttagaattgagacaaggttggcacccggccaacagcttttcaaacggccacccgggccaacaactttccaaacggccacccgggccaacaacttttcaaacggccacccgggcctagctgattccatcagctaaagatttttcaaacattgaaccccttttcacaacagtaatttcacaagcagtagtcaaacaaaactacgctaggaatcacctcacatccgcccatgaccgtgggcacggctgttcgaacagtttaatgacctctgcagagggggtacactttacccacacgacattactaacccgggtcacccagcccgtggggatcaaccacgtcgggagacctccaagctttcatgacaaggcatttcgaaagccgacacaggtttaccatatgccaacgagaggggtcccagaccaacaacaggttaggtcacagaccatactgtgccaggaagcccaggggtcctccccgacaccaccccggtgaatccacatgtctctcggcatcaaggctcccccgattagcaatttactcagccaggggcgtcccattccaccaatgtggtcgtacttgtcttatgttcggatgaaattccaaggaaacggtccttaggtgcaagagcgggaaaccgtacacccggtacgttccccggtccgcggttatggaaattcatttagttcgcaagcaccgacccaggtgtcgggtttttccaagtcttttgtaaaactccagttttacccaagttgttactcagattttaagtttgaaggcgaccgtcgatactcgcacagagtgcacgagtatcgaggcgcaactgggtggttacaaggggacatggtatagcaattaacaaaggaaggatcaaatgcgacaaattaggtaggtccgccaatctgccttgcagacgggacaaacagattaagtgcgatcctatcaattcataatattttgcaagcaacataattaaatttcaaatataggctcaagatgttcaaaggtggcttgccttgcttgagatctggagcttgatcctcgaaatcctcgcactgcgggtcttcgggctctgaaactatacgcgaaacggaacaactcaacaaacggcgaaaataaagccctattaatgacctctaagcgtgccattagatagatctcgagatttggggaattttggaagttgaacggagtcaaacggatttacggttgggaagatattgaatttctaagattattgaatttttgatctaaaggaaaaggatttaattaaatcctttttggaaaagaaaaagaaaagaagggagagagggaatatagacttttctcggacggctagggcgcggcccaagagaaatggagcggtccggccaagctaaacgggccggccggcccaaggcggcccaaactcgcgcgcgcgcgggagggaggagagagagagccggtggaccgggctcaccacgcgcggtcccgggtgggacccgcttgtcagcggctcggctcaccgtgcggagggagcacgcgacgcacgcgcgcgggcggggaagggacgcggtgcatgcgcgcggtccgcggtggacgcaggtgcggcgggcccacgcgcagcctcacggctcgcggtggatcgcgcgcacgcggagggaccgaccggggtcggcccgacccggtctggctgagctggcgccgacgtggcgcctacgtggctgccacgcgggccggcgggaggtagacgacgacccggccgcgaatggacggggggcggcggcggcgagcggcggagcgaaccacggcgatacgggcaacagcgagcacaccgggcggttgcacgtgacaaggagaggcgagccaacggctcggattcgccggaggttgctcgacggcggcggattgcggcggcggcaaccggcggcgggagaagagggaaacggcgacgaggtcacgagaggtcgattcccggcggtgagagcatctacgcggcttcgggaactcgacgctagcgtcggattgggcggaactacgccgagcgaggccggcgacgagcgggtgctacggagctcaggcggcgacggcggcgagcacacggcgagcgacggcaacggtcggggcggcgccggctaactacggggagtctactcaagctactaccgaaagctagggggaggagatggagcgaggaggaagaacggagagagacactaccgtgcgggacggggcgcagtgacgagaggccgacggcgcgggagtgatctctccggcctcgggccgaggaagaggaagaagagggcgcgcccggagtccccttccgcgtccacgaacgcaccggctctcccagcgcttggcgatggacggcggaggcgaggtagagcacgggagcggcggcaacggtgaggaggcgaatgggagaggaaaggaagggagggggaagacgggtttaaatgggcggcaatgtcggtttgagagaggggaaccgacatgggtggtcaagccggcgagctggcgctccggctagcgtccaaagcggcgacaggaggtgacgccggcgagagggagaaaaagaggaaaaggagggagagaaaggggctcgcccctttgccgattcgggaaaaggaggaaggagcggggcgactcggcagagggagaggggctctctgcctccgccccttggaggctagcgcgcggagtggcgggggccaagcaatgacgacggcaatgacggtgggatggtttggagcggcgcgacaacacgggcggcaggcgcgggctggcgcggcagagggtgacggcggcggcgaccaggcggtcggccactcggcacgcgcgcgcgggaagcaacgggcggcgtggctgggcagcgggaccgggcgacgcggacggcgcagacgacgtggctcgggcgggaaaccacgcgggcgcgcgcgcgagcaacggcgcgcggggccggctttgcgagcggggagctcgcgcgagaggagggggcgctcggcgtggctctcgcacgcgcgagcagcgagcgggggggagggaaaaacgcgccggggtggggagggagcgagagagagagagagagagagagagggagggaggcgcccgggagagagggggccgggaaagagatgggccgagcggaatttggcccatcgaacccgggggaggcaaactagacttttgcggagggattcgatttggaaggaattggattcggaattgaactcgacgatagatcggggattgagatcttgagatggcacggacactagacaacaatcaaagaaacaaatttcgcaattagggttttttggagataattttcccgctaggcgccacgacggaacgggcgctacaagtactattattttactgccaattgcaaagaggctttgaaaatttaacaatatatgcctatttgtttacttactgtcagtttcaaaatttttactaaaattgctacaaatagaatttctggagtggctcaaatggttattagtcctacacatatagcttttatacctgggaggaatattatggagggtgttgttattcttcatgaaacgatacatgaattgcgttgaaaaaaaaggaccggtgtactttttaagattgattttgagaaagcttatgataaagtaaaatggtcttttgttcaacaaactttgagaacgaaggggttctcgcaaaaatggtgtgactggattgcatcttttatcaaggtggacatgttgacactaaagtgaatgaccaagtgggatcaaatttttaaacatttaagggtttaaggcaaggggatccgttatctccaattctttttaacatagttgttgatatgttagctatattaataaagagagcaaaagatgatggtcaaacttctggagtggtcccacatctggttgatgatagtttatctatcttacaatatgctgatatttttttagagcatgatttacatatagctaaaaatataaagttaattttaactgcttttgaaaatttatctggcctggagataaattttcacaaagaatgaattattttgttttggccaagcaaaggaatgtcacgagcaatattcatttttttgggtgcaaactaagagattaatatttacatttatagatacccatgtagccaatattgtgtggaagaatgaagagtcacgcattaaatccgataaagttattaagtggattggtagttggattgaaatatgcctatcaaaagtaaaattttcagatttgaaaatatgcctatcaaaaataaatggaggtagtaacttcctgtttggaaaaagaaagaaaaaaaaaagcacacactttaagtagtatgtacatgatgctacatatatcaatatgctacgcaagaagcgtatatctatgtagctaaggctgtgtttagttcgtgtgccatattttttttaagtatacggacacacatttgaagtattaaacgtagactaataacaacacaaattacagattccgcctgtaaactgcgagatgaatctattaagcctaattaatccatcattagcaaatgtttattgtagcaccacattgtcaaaccatggcgtaattaggctcaaaagattcgtctcgtgatttacatgtaaactgtgcaattggttttttttcatccacatttaatgctccacgcatgtgtccaaacatttgatgtgaagaaaaagttggaagtttgaagaaaaaaagtttgaatctaaacatggcctaagataataagctaacctagattctttccgagttgtacgaaagcacaggtattttagctaatctctactattataaaaattaaaaatgtttttgtcggtattttggtacgtcatccgtgtatgagtcggtttttaagttcatttgcttttggaaatacatatccatatttgagttggtttttaagatcgttcacttttggtaaatacataaggaatcatataagaaatctgtttaagaaaactcacatgctaacttgagacgatcgggctccagcgaactcccacagtgaatttcattttaactaaaccatataacaataataagtgtcgacaagtgatactcgtagaccggatgattagggtattgggtatgttggaacgaggatctacgtaatacgacatcaagcaaacaaaagacaaggattatactggttcaggccctttatcaggtaatagccctagtctagtttatatgagattgatgatggaaaaccacaggttacagtgtaagtagtttcgtaaactactcggcgacttggctccgtgtactccggctacgtaaactatggtgggtgtgctggcgatcagattcgatgccttgtacccctcgctggggtcccttttataccgtggattatcttaaccctcaagtaagacttgagacattggatcttgtacattataatagaaactatatcccttccaagtagaattttagaaatcggttgactcgaggagatattttccataatttgtaatagattccaacaatgtccacgggaacaatccgtatacgtgaaagtatgccatattcatatattccataagtcgtaggatatgaggtatgccttatctgtaaccttgataataagattaaaatagacttcatccgttgcaacgcacagatattttttctagttatataaagaaataaaatcccaagctaattaagcatgcagatctatatatattgttattaatttgtcatgtacggttaacttgactgtgcacaaacacatgcatcagcccaataatctatatatggagtagaaaactaacatatcctataatattatacaagtggtcttgcttagtgtagttattacttattaggatttttctgagccgtggttagccacgtcaccctttttttccggtcgttcaatcaaatgctcaccaaccgttcgattgcaatccatcacacagcgcacatacttttgcctcccttcgctcgcttctctccttcccccgtccctggcgcactctgctagccgcgccacgccgcttctcctccacacccccacccccgccgccccaggtcgtacagacgctgccgctccgcctccctctccccggcgattctttctccacgcccaccaacgagctcctatcagagtatcaatcattaacctcaagttaaaagggcatccatcattgttttcttcctcatatcacagttcctcaaagacgattcatcgtcttctgacctcttcgctggaagctccagattttgcaaacctcaaatccttccttgaagttgatacatcctcatctgaggagtctggtctccatttcctgtcaaatcatcctgctgcaactgattagaacctctcttaattaaacagggagggtgaaatccgaccactggcaacaactctagcaatcagtggcatcaccaatgcatcgctagactcctgatgtcagaaagatgcctcctttgttcgcaaaggactaccagaagcccagctccattgccgccaccatggcatggattagactccaaacttctctgatctatcttgaatctagtgccacttgatgacacttgaagttgcctcagctctgatctggatggcaagctctcttgtagtagggcaaaggataagggaaaaaatttcattgcaacaaaaaacaaaggaagccagaatattcagaacattcaaacatattactattgtatagcatgcttacatatggcctgaaaccaagttgcaggaaacaagagaaaattaatgcatgccttgaaacgtttgaaactagagtatttcattgcaaaaaaaaaaaaacgaagtcagcatatattattgctactaagcaaatcacatttttgtgccaaggatttaagaccggaagtgaattatatgaggtgacgccatcaccgatccctctgtaatttgcttcttcagcaactcctgctcctggatggcctccggataccctgtcgaagcaaccttgatcttgggatccaagtcttcgcagcactcgagcaccttcctgtcgtacagggatacatcctctaggttaacagcagcttccatgatgtgcctgatgtatccaaggaagttgtcatttggttggaaaccatagattgtgagcttcgtcaggttgtaatgcctaaaaccatcaggcgcagatgactcccactccacgtctgttttgtcacagaagccttgtgcttcccgttccacactgtctgtctccatctcacaccaatggtcccaaactgttatgcatagctccttcaggacaggtgcagcttcaataaagaagcgtgtccaagcgatatcacatccttcagggagttcatccagattcagaacttgcagattccgaagaacatgtgcaagcagtttcgggcactctggctgaacccaaatctgcaataaaagtaataatggaagaatgcagattaagttgagaatgatgaacaaataacctgctgaggacttgcttaaagtaattaccttttcgctcaagaaattgaggtgcaggtctcttatggaaaggacattaggaaggaattgacttaacctgataaccttctgccatctcatgctttcatcagtgaggcttaggctcgaaagcaacgggacgttgccaaaagacaagggttcttggggacagttccacagactaaaaacaaggcgtttgaggtttggtagggagctgagctcaactagttctaagcccgcactagagatattaagctcaacaagccgcgggtgttcaaacttcatctgcaacacgctatcctctgtttgacacatggacaaacgcagatactctagccgtttgcatgtggcgatgatgttgagaatgtcagtttcagcaagccttaagttgcgtaggtggagacgcgtaaggccggcaaatgcatcagtacaggcaccaaaaaatgtcatgagctgcttgccattgtggcggagatcgtcgatagagcaatgttgtgcccgcttaccagtcagaatactgaattcagcgctgtcgaggttgtggctgtgggtggccattgctcgggcaacagttttgccaatggtgagacaatcatagtacttgaggtagaagcatatggtgagttggcgaaggggaatctcttggtttctgaaattgaggatgttgtctgttgcatcagacacagcagcgttcatctgaatctgaattgcgtccttggaggtggcataataaccataataatggggcacaaaggaatcaaccgaaatgtctaaatttgagagcaaatggcggaggtggatcgtcctcttggaaaggaggcaggtcctgacagcatcgggggttgacaatattactcccctagcctcacaaataaattcctaattcctttatgatacttcaacaaaacagttgcctcagctcttagctgcatgtcaagctctcttctagttgtagggcaaaggataagggaaaatatttcattgcaacaaaaaaacaaaaggaagccagaacattcaaacatattactattgtatagcatgcttacatatgccttgaaacgtttgaaactagagtatttcattgcaaaaaaaaaaggtcagcatatattattgctactcaacaaatcacatttttgtgctgaggatttaagaccggaagtgaattatatgaggtgacgccatcaccaatccctctgtaatttgcttcttcaacaactcctgctcctggatggtctccggataccctgacggagcaaccttgatcttgggatccaagtcttcacagcactcgagcaccttcctgtcgtataaagatatgtcctctaggttaactgcagcttccatgacgtgcctgatgtatcccataaaattctcatttggttggaaaccatagatggttagcttagtcaggttgtaatgcctgaaaccatcaggtgtagatgactcccactccacgtttgttttttcacagaagccctgttcttcccgttccacactatctgtctccatatcacaccaatggtcccaaactgtgatgcatacctccttcagagagggtgcagcttcgaggaagaagcatgtccaagcgatatcgcgtccttccgggagttcatccagattcagaacttgcagattctggagaacaggtgacaacagtttcgggcactctggctgaacccagatctgcaatacaaagtaataatggaaggatgcagattaagttgagaacgaggaacaaataagctgctgtggttaaagtaattaccttttcacttaggaagctgaggtgcaggtctctaatggtgggggcactagaaaggaactggcttaatctgataaccttctgccatctcatacttacatttgtgaggcttaggcttgaaagcaatgggatgttgccaaaagacaagggttcttggggacagagccacaggctaaaaaccaaccgtttgaggttcggtagggagttgagctcaactagttctaagcctgcactagagatatcaagctcagcaagccgcgggtgttccacctgcagctgcaacacactatcctctgtttgacacatggacaaacgcagatactctagccgtttgcatgtggcgatgatgttgggaatgtcagtttcagcaagctttaagttgcgcaggtggagacgtgtgaggccagcaaatgcatcagtacaggcatagaaaaatgtcatcagctacttcccattgcggcggcgatcatcaacagtgcaatattgtagcttcttatctggcaaaataatgaattcagcgctgtcgagcttgtgggtggccatggctcgggcaacagctttgccaatcgtgagacaatcatagtagttgaggtagaaggttatgctgagttggcgaaggggaatctcttggtttctgaaattgagtatgttgtctgtcgcatcagacacagcagcgttcatgtgaatccgaattgcatccatggaggtggtataataaccataataatggggcaaaaagaaatgaagcgaaatgtttaagtttgagagcaaatgtcggaggtggatcgtcctcttagagaggaggcaggtcctgacagcgtcgggggtgttgaggcggtccaggatgttgagcaagacatcatcaggaagcttggtgaacctatccaccactggtaggtggttattgtgagctgctgatttctgcatcaatataattgcgaaacaaaattaaaccgtgcatgcatgcagacggcaggcatacaaatgcaaagaaacaacaacaacaacaacaacaacaacaacaacaacaacaacaacaacaacaacaacaacaacaacaataataataataataataataataatatagaaatatacaagaagtaaatagagaaatgaaaaaaagaagaaaaggcaagcggcttacattgcggttgcggcgactacccttcttattcttcatggtggtggtgtaagtagcttaggtgatggatggattgggtaacagtttattgggctattgcgcttattgtttgaggtggatagtatgaacgcgaacgtcagctcctccattatataaggaggaggagccgaggagaagaccgacgggcaactactcatcatccgtctccgtctccaaaacggaggacgactctggattggagtctggattgggattggaggaggcacaagggcacaagggcacagctcagggtgcgcctgcgccatgaccatgcacatactcctagctagcttgccgtccgtctggctttaatttgacacatcctatacggagggctttgcctcctttcagaaattttaaaaatatatattactccataattgttcagcacagatactactactctctcactcaatctatctgccatctttcagtaaaagaaaaggaaagaaatgcaattgctatttcctgattcgaatcccaggtacatccttaaggcccatcttcagagcagttttcctgtacagtgctggaggcttttccaaaccgatggatttacagaacctgttcgctaggtcaacaagcatggtcttgtctcttccaacatcacctattgaattgtagtagccaagccatgcgtgatatgctgcctccttgatgctcatatcaactatctttattgaaccatcaacctgcattacaaatggaacatgcatgttcgttcaagctggagatacaattgacaacgaatgcacaccgctgtaggggggaaaatgtcctacttatatttactcaaatccccatagacggtgtaaaatggttatactaacagaatggaatttaaaatgataaaatggttattcgtacaaacaatggttcaaacagaaactaaaatggtatagttcatagcatatgtcatggttagtgcaaaatctatgcaacagcatttagctataacttatgaatctttagattagactcctatccataagcgatatataagtcccaggctaattagtgccaggctcacatcaactgttttttgaacaccatagtacgtctctactcattcaacctaaatacaacgaatcgtatcaaagacagtaaacaatatggcatggaggctaatgcagtctgcaaaaacgaaacatgacaaaagcaatagtgctaggaatgctggttattttgtgcaaaagtaagaaaaatattcctccaaaagaacgtatcaaagcaaacaaagagaaaaagaggagcttaaactagctatcacctatcagtagttcagcctcaaagtagcaaatttggcggggtacaagacttgtatgcccgagtagcagtagtgatttaataatatctagctctgataatatgctagctcatgctgcactaacagaatagacaagttaaaattagctcattcgaacctttcgtttcatctcctcgtcaatgtttggtgtttgagacttctgcaccgggagatcatgtatctcatttaagaaatactcttcccatggcgcaagcaaaagaatccctttaccagatttaccttctcttccggtccttccaagtcgatggatgtagtgctctctatctgaaggaacaccaacctaaaccaaaatagtatatatgttaaaatagtaattgcagtgaagaagcagccatacaatcagctgcagagaggtccactacagcagttgcttttgcttcagcaaagtagcaattctgtcctgaactttcacaactacatttttaaaagaaaaaagactacctgaatgactaaggtgacacctggataattcactccacgtgttgaaacatctgaggtcaccagaatcaagcgactagaatctcgaaattcttctgatatccgagttctatagagctgaggctttcttgaatggatttctcggacatttagcttcaaatctcgaagcattatatacataaattcagtcaccatggcagttgtgcagaaaacaatcacctggaatgagaaaggctaagtaagtttatcatattttaattcttaatcaattgtctggtcaaaagagagggatgagagcaccttatagtccacttcctgatcaatatgttctcggagaaggcgataaaccatatgaaaatgcagctcatgtggcataacgagatacaactgctccacctaagctcaagaaaaccacatatcaagggatcagtaagcaactgaaaaattatttccatgggagaagataaaaagagactacgcagcaatattttacttttgagctaaaaatcattagaaatatagtttatatgttatacaaagtgtacaaatgtatcaaatatccaaatggtcgacacaatggcaagaaagacgtatggtctaggatatctgtttatgtgaatgtctgtatgtgtatccatggaaagcaaaagtgctgaacaatgcagagctaatggaagtcccttccatagatgcaataatgcaatgggacctcttttaattggcacattaaaataaatgctaacagatgctctaggtaatgcaaaccaagaaaattgatcacatcacatttctgtacttgcaggagtcagaaaaaatgagcacattgcagatgagaaaaatcgaagattaagttgatatgcagtactaaatatactagagtagaactggaaagtatagaccttagtaggagtttcaacagctcccaagcccactgtatcaacaaaaacatgatccctttttaaaactagctgtgaaacccttcgaacctgtcattggcaaattcagacatgtggttgtcaatcaatacagaaatagatagacaaaaatttacagaatactagtgcttttgcccatgctgatcacagtacctcctttgggattgtagcagaaaatagtagtgtctgtctttgacgtggcaaactatcaacaatcttttcaatgtctgtacggaaacccaaatctagcaaatgatcagcttcatccaatacaagcaacttcaatcccatcaagcgaacagagaatgaagatttgttctcaatgtgatcgagcagtctaccaggtgtagcaactaaaatcttcaagggggaaaacacaagatatagttcagacaaacgacaaacatcagcagctattaccttgatctatagtaggtcagtaaacattacaaacctggcatggatcagattctaaacgtctttgatctagcttgaatctagtgccaccaataagagattgaacaccaattccttgatggtacttcaacagaacatttgcctcagctgtgagctggatggcaagctctcttgtagggcaaaggataagcgaaaatattggagacactcgatgatttgtatggctcttcatagcattcaagactgattcaattgcagggagctgtttatcaatacatttatgaataaattggttgaaggaaccaacaataaaaactaaacatctcaaagtatctccttgcaaaatagtattaccagaaaagctgcacttttgccagttccagttttagccttgacaagaacatctttgcctggatgcatacagtgatgagtgaggggcaacctcttgattgttgaaggtttcagtggtaacatgttcagataaatcaaaagataaaatggtgccacaaggtgctaactgctaagtagtatgtgtggaactactgaagtgagtaacatggtcagtataaacttgtgttgttagtagcacatattcgaatgaaaataaaaaaagaaagtaccttcaagacacataggaagtgctgtttcctgcacaacggtagtctgtacatatccagcatcagtgagtgcttttactgttaggggagagataccacattcctcaaatctgatgtcaacgaaacaatagggcttattaatcacatagtaagtatctctgtttcggagcatgctaggaggaatacactctctatttattatggttaattcttgctgtagatcagtgccataaaaaatgaaactccaagaagactatgtgtagcaacttcttagttcatataccatgatcggtatgtttcaaattcttttgttgttttgcctaaaagttcataataacaatacatatatgatgttctaaagctaataagctccagaacaaataaatcaaaactacatgagcaaataggcagcaatagaaggtaaactaaagtgtaaccttttattggtaaacaaagattcgcccctcgactcgtaacgcctccgctcagcacccaacacttccctgttctttatctcctctcgcagctctcggaagctaccagcgagatcgttgttttcttcctcataggacttgagcgctctcctctccttcttcatatcacagttcctcaaagcagcactgctccatttcttcctgatggcacttctcgcctccaattcatcgtatcctgattcctcctcactggatgctccaaacctcgcaaacctcatatccttcttcgcagttgatatatcctcatcatcctcatctgaggagtctggcctcaatttcctgccaaatcgccctgctgcgaacgagtagaacctctctccattcaactgcgagggagcaatccgagcactggcaagacctctagcaatcagcggcaccatcgatgtaccactggactcctgatgcgcctggaacagaggcatcactgagtaggatctcttgggaccgaagaaacagaaggatgcctcctttgttcgcgaaggaatggcggaagacgagctccattgccaccaccagggcgcggccgtctggaaatccctcctaggattgaacgcagccagacgcggctccttcccacccctcggtagctcctgctttgtagagtccaacttacggcggtcgccgccattcccgccaacggagacgatcctcctcggcggccgcggccggtcggcgcggtggatgggcccgtcgtcttcgttccagagatcctcggcgccgggcaagaggaagcggtcggcgagggcgcggatgtgggcgcgcgaggaggtgggcccgtcgccgtcgtcgggaggggaggcgccggcggcgggcaggcgggaggcgcggatctcggagcggaggcgggcgaggtagagctgcttctcgtggcggaggagcccccgctccttgtgcctcgcgagcttctcgtgcatccgcttgtgctgccacttcgacagcccgcccgggaacgtcctcggcccgccccccatcccaccggcgtcctcgtcggcggcggcggcgagaagcagtagggtttatcaatcaattatcactcgctgggatttttcccctatccagggagggttttgacttttttgactctgacaggtcgccgtttccgccttctgagaatacgtttccgccttcgcgtggggtttgcagaaaatgggtaccaactgaatcctcaactcgcagatctctcgcggggagagcagaagcagagatggagaggaagcgtgtgctcgtcgtcgggggcagcggctacctgggccagcacctcctcgccgcgctcgctgccggcggcgaggtcgacgtcgccttcacccaccaccgcgacaccccgccgcagccgctcctgcacgcgctccccgggcttcgcgccttcagagtagacctccgctccggcgatggcctccgcgccgtctccgagtccttcggccaggtacctgctctacgtttcccatttcaagttgtgatgctactgctagtcagaatgtgcgttgctacttcactctctttgcagcatggaaaatgtaatatgttcttactgcgagaatcgaatcgtttcctttcctatgaaaatccctgcaaatgtcttatgaaattgtgtagattttagaattttctagagctaatatttcaaaaggatggaacacttgacacaacgcctttgctgtatccagtttggtggaatcttgaagtgctttattactaaataaataatgtatgagacagaccgctttattccttttctaaatggagaatttagactatttaccatcaaattcacgttccttaatttttttaccacctaatccgtatgccctctataatatgtcattaggactgctaattagcctatttggtaacactttatctatttttactgtatttttcttttcttaattttatttgtatatattttcaagatttgtggacatttttaccctggacccacctgtcagatcaaagagagatactctgggtctagatcgattcgctccctccaggcgtagcgccaccgccgccgccacacgcttcttcggcgtcgcgtcaccaccgacccgctgccctgcgccaccaccgagcgccgccccaccacccccgccggcactgtgcggcagcacctccagccgccccagctattaggcagcacatggcatggaaacgtagtaatccttcacaagaacatgccatgttttccatgttccatagctagctaagctttttagctttagcagcagcatggtgagtgagtgacaagattcatcggcatggtagcatctagcgatgcatgcaaagctactaacacagtgatgtttgtgtagccacagcgccacagatcgtgcagtggggccgtcgagttggggcggcgggggcgcacagtggcgccgccggcactcggcggggtggtggcgctcggcggttggggcggagtggcgtcgagtcagctgcggcggcggcagcgctcggcgattggggcggcgagcttgcgcaccctggcggtggcagcgttctgcggcggggtggtggggcggcgccgctcgggggcggcaagctgggggcggcgctcggtggtggggcggagagctgaggcaagtggcggcggcggcgatcggcggcggggtggtcgcggtcgatggcgccgatgccggtcgggggcgttgcctggagggatcgatcgatacggagaaatatctctcttttggatctgacaggtgggcccgggggcaaaaacgtccataaatcttgaaaaatatacaaatagagttaagaaaagagaaatacgaaaaaaatagataaagtggtaccaaatagactaattaacagtcctaatgatatattatagagggcatgcggattgggtggtaaaaaagttgaggcacgcgaatttgatggtaaatagtctaaattctcttctaaatgagtttaattaccatgttcagccgcatgtgattgtgaactgtgctgcaatctcggtacctcggcaatgcgaaacggatcctgctgctgctatggctactaatgtaccttcatcacttgtcacttggttgttaagctttgggaatgacaacactcttcttatccatctctcaacagatcaaggtgcactgctctctcaactctcatccttgataatctgacgctatcgaaactcttctgcaggcattcatttttttcgtttaaaagcctagctagagacaaccgaggatcttatgaaaacccagagtttataggttacttgctaatttatgcatttgtggtctatatagtaaccagcaagtgtaggaaattccttcttttgatcttaccaagtcactctcttgtggtaccagtttacgagggagtaaaatccttctacaaagaggatgatgagaccttgccagtgaacatgtacggaaaatctaaagttgctgcagagaagtttattattgaacaatgctcaaactatgcaatcttgagaagcagtattatttatgggccacaaacaatttctcctgtggcaaaatctcttccaattcaggtatggttaaatgactaatctgcagcagctacaatacttcctccttaaagcaagttaaacttttagtcttatcatagttgtttagaaataagaactacacctcatagattggattgtctaactaaaaaagttcttcctctgtatgcagtggatggatagtgttctttcacaaggccaacaagttcaattctttaatgatgagttccggtgtcctgtttatgtaaaagatatggtggatgtagtgttgtctttgacaaaatcatggttagcaggtataaaaaggttaccacatagtgatgttattgtctttttatttgacaatttttaaaatcattatttttgcctctcgaggaacgactatttctcatttattggctccattgatgctgaggtactgacatcaaagcacatgctgcagatggtaaagctgttcaagtactcctgaatgtcggtggaccagatagagtctcaagactgcagatggctgaatctgttgctgatgttcgtggatatagtcattctataatcaaatctgtatctgcttcatcggtattaatcttctccgtgggtcacagtaatcaagaatgcatatttgcttgtcaccaactcaccgtcgaaagacatattagtatttagatactccctccgttttttaatagatgacgccgttgactttttctcacatgtttaaccattcgtcttattcaaaaaatttacataattataatttattttgttatgagttgttttattactcatagtactttaagtgtgatttatatcttatacatttgcataatttttttaataagacgaatgatcaaatatgtggggaaaaagtcaacggcgtcatctattaaaaaacggaggtagtacaatttacagttatgatgtttgcaacacaagtggaactagcctttcctaatttattgatttgttgcttgatcgatgagttcagtttaggtactatgcattgctatgactctttactatttattatccaggttgaccggggtgtagcttctccaccagacatatccatggatatcaccaaactaacccaaatgcttggtatcaagccaatttcatttcaagatggagtcagagctacacttgctgcagaagctagtacatgacactttgtctgttcattttgccaagagagctgcttggatttgtctgtgaaagtatgtgagataaagagccactttcagtttgttgaacagtggcaaatctgtgttgagtatatgtgaaagatgtaacttttcgacggtgtgaaaaaggaaattttgcgttcacccgacatcaatatcatgtattactgtctggttttatacttccgaataaaatcatcattcattttgtactctttttcagtagcctatgattctatattaccacatattatactgttatgagttactacctccgtcccatattacttgtctttttgagtttttgtttgtcaatgtttgattattcgtcttattaaaaaaatttggaattattatttattttatttgtcaattgctttattatcaaaagtactttacatatgacttatctttttttatatttacactaatttttcaaataaaacgaatggtcaaacgttgcaaataaaaagtcaaaaacgtcatctattatgggacggagggagtatcaagctgtacttaagactagttagagccatcacctactttagtcaagcattggatcatgtgcttaaaccttgttggactttgcagcaatactgctgggagaagcttccacaaactttgcagaaaactgtggcagcatcaaaactgtgtcaggacctagtgctacatcactcatgcaggtaaaaagcaaaactgatatcaatgaaggtttgaattcttatgcttgcagctgttaaatttaaaattttacacttgcgaagcactgtatcaggtaaattgcagccatcctgctcctgcagctgctcatggacatttattctcacaccaaagcatgaggtgtacacatagcatcactggatgtcatctataggtgagcatccatattaataagtccgtgtatggttagtagaattccagtcaatctccagctaaagcagcaattgttaatcaacagtaaattggttgcttatattaaattgctcttaaaatctgcttgcttcgtgtggcgttattaatgaaaccagcagtgctgtcacgcgctattgacagaacatacatcaactggagtaactttttttttgctgggaattggattagcaatttgacatgtcacttgcaaagatattgatgttttcctgctgaaatgcatggtgactagtcccaacattccaaagagctggatgaagtggtaaacgatcaagcttcaactgtgcattcataaacctgttcattaatgttactgtgggcacccgaacattatatcgtccagtgcaatttgtgaccactacataattttggatgagtgggatccaattttatcagatgtctcttgtggtttgacgggcatgtctcaggctgtagttgactggcacgctgagtccaaacaatatctcctttgttcattattcggcattgtggattttatatcgaatggtgttaaattgtgatcatgggtacattgaggtatgagtgtctatttatacgtatatggatcccactcatccaaaattatgtagtggtcacaaattacactggacgatacattgttcgggtgcccacagttactacatagttcatgaaatgaagccattttttttagttgatacatttatgttttggtccctgcagtctttaaaaagatcactgaacacccttttttgtgattttcagcagatggaatccatgctcgggaagatattgatactctaatttagctttagctaacatgcattgaaagtctaatggtagggtggttattggttaacagaggcagaagatgtcactttttcaaaggtaatcatcggttgcttgcttgcttgcatgagcaggctagcagacaagattgtcaatagtctctgttcactctagccatttctttattcgacatgagtttcatgaatccttctatagattccttggagaaaagataacttgtctatacaaaaatcaggcaagtttcaactgaccaaaagaactatggctgtctttagatccaaaatttggatccaaacttcagtcattttccatcacatcaacctgtcatatacacacaacttttcagtcacatcatctccaattttaaccaaaatccaaacttttgatccaactaaacacagcctatatcgcattgagtccatatgaaaaaaaaaaggtgggctccacatgccaaattatcagtgatccaaacacatcatcatctaatatgcagagttaactggaccataggatggaggatcatgagctctacttgttgtcactcctgtctcctccctacaggaacatgacattgacactggcctgcctaaaatccatattaaaaccctctcatccttgcccctctctgactccctctctctctctctcacacacacacacacacacaaactagagacttatgccatgaggaggttctccaagcagcacctggtccctttcattctgctcctgctacttgtcatgtctcacttgccaatctcaagccttggttcaaggagagcattcagagaagaagctgtcagtggtttcagaagccatgagcttgctccaaccatggctccttctcaagagaaagaagcaggcgtcgtcgccggcgccggtagcatctgtggccagaagtatgctgtctcaagaagaatggttcctcagggaccaaaccctctccacaactgatgaactcatgcactgcaatctgccgtgatcatcagcttctccaatacaggtgaatggtgcagccatcattggttacctttaagtccgtctgcttaattaactagatatttcatagtattttatcacacaacgaatagagatgttcagtagtacaagtgatgtacctctcttttgcaatgttagcctttgtgtatagaaatatgaagatgcataagatggattgtgctgtagcataaattgaaatttgaaggctgactgatgtgaagatgactgtttgtttgggttgcttgtgctgtcaagctagtctcaagcaaggtgtaatgtatctcggttggatgtgtgcattatcttgtggtggttgaaggtcttccatcaccagctaaaagcaaacttgtgacagagatcagtttcagtctgaacactcgttaattaagctcgtgcatgtttgtatggctaacatgagaaaatctggaaatttttcaagcacacattttccatctatatctctcttctccctctggatggttaagttttggccatgtttgaattggataagggattttagaggaggaaatggtggcatgtatagtagctggtgcagttggtcagcaattcccggaggactcgctgaagagacaggagattaggtacgtagctgcatttgtttagtgatttcgttcacgtggatgtcagtgcttggtcatcgataatcggcgatggcgaagcatagccatcactactccaagtgtttgtactcctgctgcagttgtagacatgtagattgtagtagtcatatttagtcaaaggtgtgtttagttttttgtgtaaagtttttaaagtatacggacacatatttgaagtattagcctgtgttcgacatccagttttattcaacatctagtttttccgacccttcttcctcgttttctgcgcacatgattttcaaactgttaaacggtgtgttttttgcaaattgtttctatacgaaaattacttaaaagaattaaattaatctattttttttaaaaaaaacttagctaatacttaattaatcacacgttaatggacagctccgttttccgtacggagggaatgagtttccaacctacatatgcaaacacagccttaaacgtagactaataataaaacaaattacagattccaactgtaaactgcgagacgaatttattaagcctaattatttcgtcattagcaaatgtttactgtagcatcatattgtcaaatcatggtgtaattaggcttaaaagattcgtctcgcaatttacatacaaactgtgcaattggttttttttccacatttaatgccctatacatgcgtccaaatatttgatgtgacgtttttggccaaaattttttgggatctaaacaaggccaaagcaagttcgagatccgaaatggatactacttctacctgtaaaagagtacacttttgcacacaaatttaaataagtgcatgtatagatttgtgtagaaaatgaactccttttttacggaaggtagaatctggtaggattcgccattacaaaacagtcttcctacgctttgagattttgcaggcatcagtagaccaacgaatatagcatgttcatcgcacagaacgagctactgcctctgcataaccaaacgcacattctgattctccagatacttcagataaatcgaacaagatctaagtattgcattcctttcttatgaacgaaacgaagaaagaattccattcagcaacatgtaaacagatcgtcaagaacgattacgacagcaagaggcaaacatctcaaggcaatatattgcaatttacctacaaatgcaagtctgaaacgcggactaatgatcaccccaacgcgtaggcaaccaggacaattaaaaaccttaataacaatcaattctatcacagtactagcagtacgaaatgtacgacgattagcagcaggcatatatcagagccaggtgaggtgtgagggcaggcgtacagctcatccaataaaagagagcagaagaacatgacgacagtgacataacttcacattgaagggcattgcacggttcagacttcaggcacaggccgacaggcgcctctcatctcaacgcaacaacgcgttgtctgctcccaaacacaagagggaaccagtgattaacatttaacagcatggcaccacctatgtcaccagcaattcagacatcatagtttccagtcacaaatgattctgacagtattcatgttttttttttgaaaaaaaaaagaaacagctgattctgatctactggtttcatcagcgtctcagctcagtttcagcaacaaaagattctggtttcccatgagtcatggtcagcttgttcccttcatcactgtccaaaactctggaaaaatccagtagtgatgtactcatttctttcagtcatgcacagttgttatgagatttcatggcaaaaataattgcttgggaatcaacattcagtgataagcactcattgtcagaaacgtccacactcatctacaggcatcagccaacaaaaagagactgacaagcttatccaaataagcattttggggaagacatggaaaagacatgaaatggacctaaattccttcagcacttcaataagttattcatcatgtctatcgaagattgaacccaggaaaaaaaaatcaagcaaccataatacacatggttatcgaaaggacttggagtacatgtctacagacaggtccagaaatgtgcaaaatagatgaattttgtgacaaatgtgcaaaatagatgaattttgtgactaagtaaagtcttgaggaaattagtgcaaaaacaaaatttactgaaacggagaacaatccatatgccttcctgcaatagcatgatcaggcaatagacagaattaaatttgcaagtgagcaaaatgtacttggtcatatgcaattgtgaactgcaacacatcacaacaatttctttgttatatttcttatatagcacaaggaaggcacaatatataatcaccagatgaccatattttatatttatatgaacaaattaacccgaaagatttggttaaacaggggatccatcgtgcgaatggaattacacaagtaatattgctcctcggcttgttcatttcacaatcataaaaccgcaagtgatgaatatatatattgcatactaaacaaatagacagaagaagctgatggatacgggtgatttcatgttcataatcacaagatagcagcaagtaataatagatacgatgatttgattgattagatataacgcaatccagtacaaaaggcacacggatattcacagccggaggcagaaatcacgataggaaagacagatggtttattgtttggtttgtcacaatggctaaagatagcattcactagcagatggaattggaagacatggagaagaccaagacacatactagcaggcggcgtctcaagtaacagtagcgtagtcatacgggcgggagcttgtcgtccttgtgcttgtcggcgtcggcggcggcggcggggggatcgggatgggcgtcggtgtgggcgtgggcgttggcgtcggagagcacgagggggcggtccttggattcgtgggcgtcggcgaggtcgtcgtcgtcgtcggtggagaggttgatgcaggagcagcgctcgagggaggcgaagaaggcggaggtgacgctggcgcccacccagcttgcccagctctccatggccgccgccgccgatcgatccgcaaggctagggtttcgtcgtcgtcgtcggtgggtgagtctagtttagtcaaaggggaatttgaagcgaaggggagaacgagcaaagcacgactcagccaaacacgccaacggagaaagcggacacaaggcgagcaggcccatcggcccaccaagcccatagatgtacttcatgggttgccttggggattttgacctcctccatccgaccagtagtagtacatgtataatattttttttccattttctctgaaacaaaaaggataatcttccaagctgttttcacatccacacaaaatggcttcgtcggagaaattaaccatacgattgcaatcctacggttaatcaatttctatgttcgcttttggctgcatctctggatacctgtggcctttcctttgtcacggtcacccccaccatgggtagacacccattcccaacttcccaaggcaacaagcacaaccacaacttctcagtaaatccacatgaaataaacataaatgatgatttggcctcaggccggtaaatgttacatcggtgctgcacgatacagatatatatgttggtgtctttctttgtagactcgctgtctctgtatatatatcatcactggctctagattaagacttgagcatcttcttgtagtccttgaacgtgcctgcgaaaggcgacaccctgccttccgacaccacccaaagctcatccacgctccccgttatcaggtgctcgtcgtgactcacctgtaaaagataacaagtcacccatatagcttgtaattagaatgatgccaagtcatcagcttttacaccaaaatgaacgatcttagttttaccattagcactcctccctggaaaacgagtaaaccctggatcagcgcctccacagcatccagatcctgcaacacacacaaacaaacatgttaagttgtttccctatcctcgcgtgtaaatcatcgctactgaaactcccttacaaagaggggaaaaaagatatccacctaaaagaacatataaaaaaaaacagggtgatttacttacaagatggttagaaggctcatcgagaagaataatgtgtggcttcttgaaggtgatctttgcaaaggcaaccctacttttctgaccacctgggattggaaaggctctaatcaggactgacaaatttaagattctacgagcagatgaatcattgggcaagaggatagttctcaatttctcatgaaactgggaaaggccatatgcagcctttaatatgcttaagacatctatcaaaacgctctcattacctgataaagtgtacattggttggagggcaagatttcctgtaacaccgaaagaacccaagtgtgccctcagtttctgttcaggtacaccctgcaaagagcatataatacattttttatacttagatcaacgttaaatgacaaacagactgtatgtttggtgatccatacactgtgaacttcatggtgcaacctagcaattgttgctggatgtaaaggaaagataaaaatgatgcttgaacttacagggtagcatctcatcatgtacaaaagggggttcactgttaaatcaagcccatcaacatggtgttgattgaatacagccatgcgaacctgcaaataacagccgcagcaataaataaatcaacaaaccgcagataagatgtagcagatgaaactctggcaataaaaggttatattataacaaaattatcactagcaaagtggtcaaactatacaggtaagaggcaaaatacattcaaatataaaggtccaggttcagagttctctgtttaattcagtaatgacattgatacagacaggagaatgtacactccagaatctcattataaaactattgtgaacctccatggctccatgtagaaactatgcaatcatgccaatcagaattaatgtaatatcggtaatgctaagtagtgaaatgtcatgactgtagcttcagaaggataaaagaaccttgggagagcggaacactgtccctgaagttggctgaagatctccagatattagtttaagtatagtggatttgccaataccatttggaccaaccactgaaataacagatcaaacatgagaccaaaaaaaagatgtatcgtgcagaaatactaggtatcattctttgttagtaagatgagtgaagcaaagcaacatacttgctatgcggctgtccaggtcaataccaaaattcaagtttttaaataaggtggggcctccaggataaccaaaagatgcgtcactgcacaaacagatcgtaacataaatacctcagaatgtactaactgctagatcttaataagaaagctagaaagaattacaaatatagtagcaagccagagaacaagaaaccatggttgcacatgggaagagaacaaatttcgttaaacattgaaagaaaacatatcagaaatgaaacctgaagctgatgattggtggtccagggcggtcatctggtgttggaaattcgaatttatagctgcaaagaattattcaggcaactatctaagctgattgcatataaaagaataaacacaacagatttaagatgcggtgatatactctggatcactgacgaccgcatcaacatgctccattcgctccaatgccttagtgaatacagataaataaatattaaggcacagactaaagttatcactggacgactcttaagtgaaacaatagcaaaggtaatatttggatttgcagaaattcaatggagtgatgggggatgtgagcaagcaaagtcaccttgattcttgattgaacaagtgatgctctctttgcattgtaacggaacttgtcaatgaatgcctacacagaagaaagaccaataaacttcacttcgatttttcaataaggatttaattgcacatagtagttgaatgttttcagatagcccaattaagcttttgaattttagcttagactagacaaacagttcttctgagcttagttaggtctctcaacgaatttttgaggctatggtacttgctagaaagtagaaacagatccaacctgcatgtgggatctggccttctcatttgtttcaaaagctttctgctggttcttaaggtgctcctcccttgtcctctcgaatgtgtcataatcacctttgtaagcatgtagcttttgtccatgcagatgaagaatgtcggtgacgacctaagaatttattgctatcagcattaagtgatttacatgacaaggaaaaaaatgcacatgcaaatatactacatatgaattaaggacgctctgtcaaaattagctccttcatgataatatgacatgatcataatcatcatactgcataccgtattaagaaactccctagcatgtgatacaacaatgaatgtctttggccatttcaggagatatgtttctaaccataacacagcatggagatcaagatgattctgcaaaataatatcttgttagcataggccagaaagagatgaaacaaattcatgtttttaaacttactgttggctcatcaagtagcaacaaatcaggctcaatgaagagagcacgtgctagagcaattctcatgcgccatccaccagaaaactgttttgtgcgtttacgttgcatttcaggagtgaaactaagaccctggaaagagttccaccaatcagaacatataataaagtgcgtactctggcaagggcatattctactggaataatcaggatatgagttatgaaatgttcaatttcatgcaataaccagcaagaaaacgtgatagcctgggataaagattatttgttgttgaaagtatattgataactaaatgaatgataggtatgcaaccaatgtaactgcaacgagaaaattggaagtgaaacaaaagatacaatcctacatagtacaaattgtacaagcaagaaaaaataacaggtattggatgcccagaaacagaccgccagaattgatgctgcacgagcctctgcagcatcagcatcaataaactcaaggcgtttgtatatctcctcaagcctcttgctgatagcatctttgtcaagaccatccttgcttttggacgcgctctgctcaaactcagcctcatactctagatctttctgcacggaatcgccaaactattagcaaagcaactgaatggctaaatataacaggacatacatatcttaaaatgttaattctgcatttgtcaacctgccgttgaaccagatgagcttcttcttgcaaaagttgaacccgttcaatatcagcattcagaacacactgcaaagctgttgtgtcatcgcccacaacctcttgctcaacatgcaatatctggcagttcttgggaatcccatcaatcgcatgcatcgccatagctctgagaaaagaggttttccctgtaccatttcttccaacaagacctgaagtgtgcatggaaattatcgaaatcattggggtaaaaaaaaaacctggaacttatacagaaaactttcaaggcaagaggtgatgaaaagtgcaaagataaaaagcacatcgagggtctgaaccactgactagtacagacagaattaacaagtttggcatttgtgcaatttagttttggcttttggtaaagcatagacagttaggcacgctattaaggaaaagtgttgcagagatatgtgtgacttgacatatacgattacaaatgtttcattcttcattcctaagttattcatgccagctacgaagtgaacaacagctcaagaagaaacctatgctgtaactcaccatagtgcctcccaaaagcaagtgttacagtgcaatcttgaatgagatcacgaccaccaacagtaacactgaagttctccatatggatatccctaacagctggcccaccagagttattgtgatttacaaatactggaggcattccagccctaagtgcctccatttcagcaacatgcgtttggtattgagcctgcaccaataaaaggacagtgtgcaacaagataacatcaggaaggaaagcatctccagcagcagatatacttttgtcacaaaaaaaaacacttccaccactaatctttttttcttcaccaaagacaagcacatcatcctctggtagtgtaaaatgatcaattgccaacatagagaacagcttacctctctttgtctctcatcctttctcttcttccgttcaatcttggctttgtcacgtgatgaaagcaagggtccatcaaatacatcagcttgctttttgggggcaaccttatcgtccattccctcgttcatacgtaaaggagtgacaaggcttcgcatagcttgtttaggttttaccaggccatgctttccaaatttttcacaaatcttactgcagacctatattgaaaacaaaagaaaatgcatcatggtcctgctaaatcagaatcagaatacaggagttccttgttttccctctcaatgtttcgtctttcaagatagttgttgcagctctcttctggccaataaaaaaattatggaaacaaatagaggttgagtaacatagatctaacagaccactacagaacataagcagtgattgatctacattgttgttgcccttggaagccaactgaatattattcataaaatgtgagtgctaaagaaggttctctaggcatgtggaatccacagaagatgagtcaagtgcttattaaatggatgacacaggcacaaaaatcgaaacaagctatagcgaattttagtagatgagaagtagccatacaaactgtgggatacatgacaagcaaatctaaagctctgctcaaacgggcgatgaaccacataagcatccataccacctcaatcacagcactgatcaagcgaagctctacccaattagacaaacatttaggctactgttgggcggacgacgatctgatcggtggatgggggattgcagcacagtaataaaaaataaaaatcaacaagcgggcggcgatggcgtagggtggcgggcgcgtggtacctcgaggcagtgctcctcgtcggcgacgcaccgagcgtcgatgaggaggtcgccgagcgcgtcgaagatgccgtggccgtcgggggcgccgaagtcgaagtcctcgtcggcgaggacgttggcgatgtagtcgatgatgggctggtcgacctcgtcgacgacgtcgctccccagcacctccgtcaccacccccatgctcgccgccgccaacgtcgccgccgccatctcgcctctcgcgacgcccacgcccaacgaaggagaagagaagaagaggagggtttgctacctactcctctctcccgtctccagtctccacacagatgagatgggtgccgtccgatgtggaaatggacggtccatattgacggggcctttgggccttgatttgacttcgggaaggacggcccaatcttatcagaattgtaggcccagtattgaaattacagcagcttcgtgatgatatgtgatatactaggatgacaataaaaatgccttcttagaaaatggatggatgtttatacagtgaaagaatttttgcaacaaaattttttttggaacaatggatggatggatgtgaaattttattgcgacaaaagaaaggactaagttggagctaatttttgacgggatatcaaactaaacactcttgtcaaagtcgactacaaatcgttcacaactattagtgacttgttccaacccctcgatataaacaaattagataccaaattctaatttgtagtaattaactactaagacctgaagtgaattacatgagacaaatccatccccaataataaccccttggtcatcttccttcctgagcaacacctgctccttcatggtcctcggatatctcgacggaacaaccttgctcttagtcttaggatccaaataagaacagcacctacccaccaccctgtcatacagtgatatctcctccagattaaccgcggattccatcacgcgcctgatgaatcccacgaagtgttcatcgggttggaagccgacgatggtgagcttggccagattacggtgctcgaggttagccaccgatggctgccattcgacgttcgatttgtcgcagtagccgttctcctgccgtgtcgtctcgtccctctccatcttgcagcagtgatcccacactctgatggagagactctccagcctcggtgcggcttccacgatgaacattgtccaagcgatgtcgcagccttcagggaggtcgacgagagtgacatgtcgtagctcgcccagcactggggctagcctcttccagccttctggctcaacccaaatctgcaaatcaacaggttgttcacaacgagtacgtgcaaattaacttgcaaagattcagatttcagaatgagattaagttgatgactaagtgtgtggcatgcagtcaaatgatcatgtaccttttcgctctggaaattgagattaagttaatgcagtgagggggcattagcaaggaagtgacttaatcggatactgttcttccagctcatgccggtgtcgacgaggctcaagctttggagcaatggagtgtaaccaaaaaacagtggatcccgataagagatccagccctgacatttcatcgtctggagcttgggtacatggacgagctcgatcgtctcgaaattgccgtgtgatatctcaagctcaacgagatgattgtgctctacctgcagcacgctgcgtctcaccgatttgcagttgaacagccgaagaaaccgcaggtttttgcaggtgaggaggatgccggcgatgtctgaatcgccgaaccagaggcgggtgaggccggcgaagacggccgggtaggcggtgaacaaggtgtggaactggccggcgaagtagacgaggtcgtccgcagcgcttctccgtcaggatcgagaactcgacggcggcgccggcggcgagcttccgggcggccatggcgcgggccaccgtgccggcgatggagatgcagtcgtagtacctgaggtagaagcggagggcgaggtggtggacggggatctccggccgccggaattcgaggacggcggccgtcaggtcggccacggcgccgttcgtccggaccacctcgcgcagggtgaggcggcggtggtttggccgcgagaaggcggcgacgtcgacggcgatccgggacagcatgtcggggagggtggccctcatgttcttggagaggatgcaggttttcatggcgtcagaggtgtccagcctctccaagatgttgagcacgacatcatccggcaaatcgttcagcctgtcctttccagggactaaacttggtgtctgcatcgcattgcattacatgcagatcaaattaagctagattaatcaaatcaaattagtaaatagtagtagcagaagaagaagaaggcttgcattgcatgcatgcgtacattgcgcgtgcggcgacgctttctgttcttcagggatgatctgagctcgaatgatggaggccggccggcaactcgatcgggcacgcacgggggaattcgatttgttgatgatcgccgacttaaaccctaaactgaaaagagacccaaaagcttccgacatatctcaaacgtgattggaatttgaaagagactccaagaaatcttacaagtccattggcgttaagataccaacacttaacgtcgattaccctaaatattatagtattgttttggaaacgattattcggcaaagatagtaaatttcacttggtgccgtgcggctgaaattttgcacacatactgagctttccctgttctgatcaaatagatatgaaataactctgcagtctgcactacggtcaagcccagatcttgcatacacacggttacaaacatgcttgagcttatagagttatcatgcattctctggggtttcttaatccattatattatctaaaaagaatagcgacaaaaataacagtggaagtttacattctaatttttcccaaattcagacaatggaaactgaatacagattcaatctggtacagaaggggaaatttggtaggggtagcaaactgaacacactatcaaagtcgagtacagattcagacaatagtgaaatgttccagtccctcaaaaaaaaaagaaccattccaaattaattgaatggcaaagcagctaagaccggaagtgaattatatcagaggaagaagccatctccaataataatccctccgtcatcggtgcatgtgtgacttgcaagttactgacgggcaggacaggagaagagaggagctgcttacgttgcggatacggcgactacccttgttcttcatggttattactcgtttcgatcaatgcgggcaccgatggattggatgctttgcaaggaatccgattgctgatcacctgctgacctaatcctgattatgtatccatggacttataagccgtaatcttaataactgaagggagaagagctccatgtcgattacagaaccaaaagccttacgatatctcaaacgtgacgggaagagactcaaaagaattctcaaacgaaaaaggaatccagtggcgttaacattaacataccagcactccacatccaataatatttttttttattctttaggaacggcttctttggcaagaaacaaagtttcacttgtggcggcagattttttttcacacgtgcgggacttccagtgtcaaaatactacaacataaccgaattctgatctgctgtatactgcatacaaggttggttatacacaagctgagaagctttcagtgtgacagcaatccgcggataaaatgaggagaatgataacgatcaccaagaagatagccaagcaaaaattacatcaatcaaggaaaaaacaatttggggataaatggactccaggaaaaggtaactgcagttcgagagggccgaactgatcaataaacatcatgcagcatacattaattcccaccagaatttattcagcaggtagcttttctttgagatacttcagaattgctttcgttcctcgctccagcagagtccgccgtatgctgcagacgaaatcaacaggaagttcagtgatttttctgccggtgcatgtctgaactgcaactttcttttttttttccctttcatattctaaatatgccctgagaaaattatggcattacgatggtttccattttaatgttctttcacatgtagttccgaattatatggtgagcactgcagaatcctatggttatgcacgatataaaatcggtagcagcacaggtctacatggttccatgtgagttgggtttctatttcaatgtatgcatgcatgcaatgggctcaacaatttgttcctacttcttacctcctgaggggatttccatcaagtttcaagacttgcaggttaggctcaagcaaaccctgctcaaaatagtgtccacaagaagattagagatttcagtgagtttgagaatcgtacaacttcaaaacagtactttcagttgatgtcggtgcatccgatacatcatcattaaagccaataacttaccagctcaggtgggagtgttgttatattgttgtccgacagatcaagctcaatcaaagaagttaaatctttgataccctgtgtaagtgcaacggattttgcataagcaaataaaaagggcgcacgtgccattcaaaactttctaaatgcacctgggaatgtgaaaagcatttatagaaagagggggaaaatcatattccttaaatagagaaccaagtgtttacctctggcacagatgtaagataattctgactcagatcaagaattcgcagcagttttaagcccaataaactatcaggaaatccatggagtttcattcgtctgctcatatatagagaaaaataaataagcttccatagaacactccatagcttagatgttttgcatatgttacaaccttaggtagagttcctttaggtgaggtaatttcgaaaccgcagagggttcaggtagagaagaagcactgccacttaaatctagtacttcaagtttagacagggcctcaagatcagtagccaatatctgcaggaaaaacaagtgtgttacaatatcacagattagcatgcagattcgaagtatgtcagctatatataaataatcactcttttggtaatgtgtcattccaactcttgaaagtaggaacaagaaatacatgcagcacattacccccacacacccaccccccccccccccaaaaaaaaaaaatcttgtctaagatgtcttggcacatgagaaaacattaactgtaaacatggtattaaagctaagaaagaaacaatgtgacaatccctaaaaaaatgtaaaatgacttgtgtctaaacataataggctagatggcttataattatgtcaagtctttatccatgttgcctctgcaccctgtagttcaattcttctaagtgttgtaacagctaaaccatcaacttcttcaatttcaataatcaacgttgattaacttccagagattaacccatcagggaatcatgatccaataccaagaaatttgcaaaagaaaagatatgaagaccatgacattacctctgccaaaggattgttgtctagctttaacaaagaaaggctggcaagggaggagaatacggtgccaggccaccttttaattttgttgttagacaaaatcaaagactgaaaaaaatggtagattaaaaagagtaaggagttatatcgaaacacttttatctcacacatacaatggaattgatcaattgaagtataacaacatcaatattatatctgtaattcagaaactcacttgaagtgacgagcataatgacaactcgtttggcagatcttctattgaattcttagaaagatctagtttcatcacatcatttgtctcccaagctgcaggtggtacactggtcacaccaagaccactcaagtccagttcctgatattgcaccaagttaggggctattgtggaaaaaatgaaacgatcattggttattccatgaggctccataagatccaatgaccaagatattttattcttgcattggtagtcatgagaatacattgaaaaagtcgacaagtttttgtaaaaatacaggaaacatggcagatagaaacacacaaatcagttactcttttggcatgaatgagacaatccatgaatggcaaataccacatgtgggtgaattagctccttttaaaaaagacataaaaagagatctatcttatgatatacaaatatgctgtcgaaataattaaagtaccttagaagataaagacaatcttcttgctgcagcaatttgatcatcttttgttggagtgcttccagatcctgatgctgcacaggaaatatgttgagctttcgagtgatcatggataatggttctcaaatcagaaaaaaaacaggagacgtggcaaagcttgaagcagataatgtgcactacaaatacatcattatgaacaataaaatgcatggatattgattttgtgtttttggttacctccttcatcagatgaaagccgactgcgcagatactttaataatgctgttgttggtccagaaaccaaggaactggtaaccaaaatggaacactgtattattatgttggcagttctgtttagaatcctgacaacctctttgtgaaaaactaggacaatggcatgggcatcatacctccgaagtgtcctcataggattaccagtaagcagaagctttcttagggttgtcatagtaccttgaatatagcatgccgaagcatatgtgagtgtccatagtttcgaaagttcattaagatagtagcacacttgcatagagcatgctaagttttcaaagcagataccccatggaaaaaaagaatcagccctatgatctatccaacacatagagatgcatgcaatcatttcatatcataaaatttcagctaaccaaataggaaaataacaaaagtggcatcatcgagaggagcattgcacagcagaaaaaccaacctagttcagcaggcagaccagataatgagttgtttgatagatcaaggaaagagagcttgagtctacaagccccgacaggatactcctttagctggaaaagtgacatattatcagaaaataataaaaaaaacagaaatgaacttatttcttctgtaatgttctgttaattctagcaggattggttgcagaagttaagctcaatgttacaacatgagaagtttgttgttgtctaataaagtggttttggggatcaatatttacatcaaatattctgaacaacactgttccaccattccttccgaacatgtaagtaactgagttaataagaactcaaaatatatcatagcgccatccctctaacaaaacagacaggattagacaagcctatagatggtgggagtgactatggtaaatcacatgcagtttacatacactattaatgaagctcttgggatttgggaagtgggaaaatgttaagggagcgaaacattcatgaaattttctggactggagtgtatcctagccatcccgagatgatccttttttctcaaaaaccatcccaagatagtcataagcaaaaaagcctcatgttagaataaacaaatgatgtactaaaattttgagccacacagctacagatttgatgtcccagcaacaaagaaatcaaatcaagagcctttctcccagtatcttcagattttaaaatggtgcagaataacaagagtcaggggaataatagactattaaattggcagtatctgtgaaaataaatggagtaagacctggttagagtgtagatcaagtattcccaagttcgatagcatgccaatatcctctggtatggatgtcaacaagttatttctggaacataaaagtacaaatagagtgaacttgtgctgtttaaaaataagagcatggtaaagaagtttgtccaaaatagataaccaaccccatataaaactctgctagagaagagcaatcttttatggaaggaggaatcagggttatttctacataacaaaagtagaaagccatcaatacagataaaaatgaataataaagagctagcatatgcgatagtatggtagactaactgttctgatgcaggtccagacgaattagctttgacagtgcaccaataccatccgggatggctgtcagtagattctttgctgtacaggtttgaatgttaatctcaggtagaaactcaaggatatcacataggttcgacattatttttggtactgtggctgtgtggcataccagcattcatctctgtaagcattgtccatgacataaacatcttgtctgatagcgtcacgagcttgttaccctgacattttgcagtaattggagttttcaagaacaaaagaaatgcagcacgaaaatatgataaatccagctttgacattctctataaggagtatatacctctagattcaatctgaataacttggaacagccagcaagttcatctggcagtacggatatagtgttgtttgacgcctacaggtagggcattacattatatttaggacagaggatgaagagggaagctataaagatgagctgtatatatcttcatcaaacaaagaaaccttatggagaaaataaggaatacatcgatggtggcttacattgagttctgacaactccaggcatctggcaagactaactgggagatctgtaaggcaattatttgagcagtcaaccctggcaacaacaatgcatcaacttacatgaatataatcatacatagtctcaaacattgcttcttgtatttaggcgtcatactaattgtcaacatcataacatctaaaatatgtgacagatggttttagaaatatgaatagccaaattttgagcttgttttaacagtacattaatgaaatcaattagaaaagggacatagaagacatacttgactaaagcggtcgcaaaaccaatctcttcgggaaaagcgtttatttgattagaagatacatccaacgattttagcaaaggaaggctgcatggaaaagagccataaaaaagttcagatgatattagtggtccacggttaacaatggaaattactccctcctgtcacaaaaaccatgcctgcaaacttgaccagtaatctctatcgaaaaacagttgaaaatcttgatagaatgataatattatgaaactggttttgaaggcagtgacttcaaacatgtccacaaacgatatgtttccatgaccggagggagtagtaaataaggatagtccagtacatactctccaatagctgcggggagggaagaaatattgttgtgactaatgtttaatacaacgagcgaagacaaatttctgaggtcttcacgcaacacctcaaggttgttatgagccaatatgagcttctgaaggtcaactccctgaattacaaaaggaaaaaaacagaaacagaaacaaatttgattggcgttgcttgatatcccttgtttatgcagcatgtagggaaatagtcatacaggaagggggcgaatcgatttacctcccaccatttctcatcctgagcccccgtgtccaagttgttgtacacctccttgggtacctccctggcagaacaggcagaggtgtggcgtcagcgagacatcaagaacaagaagagcgaagctgtgtgcgcgcgcgctggaatcgattaacccatggtcccctagtacaccggccataatcagacaatgcaatgcagtaaactgatgtgagaagcaggtgaaggcgtcatggcgggaagggattggattgcgtcgcgtccgagcagtgggcggcggctacagactaggagagatcatcgtccatgtcgccgatggcgatccaaccgagcgagcagagagagacaatgcacctgagggatcgattggagaggttgagggagcccgactccctggcggatttgagcacccgctccatgcaagcagaagcaagcagcctccggcctcagatcgccatcgccggagacctgatctgatctgctgcaccagcaggcagaggcagcacgagcctacccacgaagaagactagaagagagatcatcaacttagcaaggacggagagctcaaacaaatcgagatgagatcttgttttcttttttttttctttttctcctctcttctttggccacacacacaatggagcgagaaattaattaaattaaaaggaaaaaaaaacagtattagtcaggcccactaatcctgttgggccaaaatcaacattgaggcccaacgtctatgtgatttggaccttggggtgaacaaatcaaggaataagttcactttaggttccttaatatgtcggcaagtctaaaattcatcctgtattctgaaaaaaaaagttactttaaaacaatcatattaatacatttttactttttactaatattcaattaatcacgtgctaatggataacactgttttttgtgttgaagtactttcccaacttctacagagttttctatagaaaagttatttttgaaaaatatattaatctatttttcaaggtttttaatacttaattaatcatattctaatagatttcgtgacgcactttctcaactgttactccctcgacttcctcacgtacccttcctaaacgattaaacggtgcggtttttacacaaattttctattaaaaaggttcttttaaaaatcatattaattttttttaaaaaaatttaaactagtactacatccgtttcaggttataagactttatagcattgcacatatttatatagatgttaatgaatctaggcacacatatatatgaatgtaaacaatgctataaagtcttataatatgaaacggaggaattacttaattaatcccaagctaatggataacaccgttattggtgtggaacgcagacaaccgcagaggcagctcgtccaatgaagtgtactacatacaagtatacaacatcataatttctccccaaaacagttatttctccgatgcaacatttgcaggtataccatctctttttttgcatacgtgcacaatgctggtgcacattatacataacacaagctggttccacgatgctacttgacaaaagcaaagaacaaaacaagagtttaaacacaccgaaacaggtaaaatggtctttaattattgattttcaaatcgaactaagaccggaaatgaatgacatccgggcagccgattcccaatccctctgcaataatctgattcttgagcaactccctcttctccatcgtacacggatatcttgacggggaaaccttcatcttgatcttaggatccagatcaccgcaattctcacagaccttcctgtcatatagggatacctcctctagattaactgccacttccatcacacgcctaacgaatcccaccaagttgtcgtcgggttggaagccatagatggtgaccttagataggttctcgtgcctgaaaccatcaggtgcagatgattcccaatctacaactgttttgtcaccataaccctcctccctcctgtcctcttcagttttcatgttgcaccaacgatcccatattgtaatgcatatctcctttagggagggtgcagcttcaagaatgaacattgtccaatcaatgttgcatccttcaggaacatcaacgagactcacacgctgcagcttgtggaacacaggccctagtagctttgggcattctggacgaacccaaatctgcaacatgagggtaacctaaattaattcagaatgcttacacgcttcagaattaatatgctttttggttttatttctctattttgggctttattctaaagccagatcagtaaggttgatcttccatgtaaacaaatactccctccgtattttaatgcatgacaccgttgactttttaatcaacatttgacaattcgtcttattcaaaatttttgtgtaaatataaaaatatttatataatgcttaaagaacatttgataataaatcaagtcacgataaaataaatgataataacataatttttttaaataaaacgaatggtcaaatgttaattaaaaagtcaacatcgttatacattaaaatacggagggagtatgaaacaaagcgtaagcataaaaatgaccggaacagcaagcagctagctagtaccttttcgctttcaaaattcaggagcaggtcgcttatggaggtgacggtagaaaggagctgactcaactagtgaggcttagacttgaaagcagtgggacatccccaaaagacaaggggtccccgtgacagtcccaatgaacataggccatatgtctaagctttggtaggcacttgagctcaacaaactcaaaatccccatagttgatgtcaagctcaacaagttgcgggtgctctatccgcagcacggccgggtcatcttggttgagacaagagaacaaacgcagatgcttcaactgtttacatgtggtgagcaggttggggatgtcaggttcagcgaaatgcaagtgttgtagctgcaggcgtgtgaggccagcaaacgcatctggaaaagcagctagaaaagttctgaactgcttgccaaagcagagcatgtgagtttcttcgcaacagcctccttgcttctcggttaggattgtgaactcaagagtctcgaggttgtaggtggacatggcgtgttgcacagctttgccgatggtgaggcaatcatagtatctcaagtagaatcgcaagctaagttggcgaagggcgatctgttgactcctgaagttgagtaatttctctgttgcaccagctaaagcctcattcatctgaaccacatcactcagtgtcaaaagatcgggtgcaatcttattgggcgtgaaggaattggcatcaacaacaatgcgggagagctcggcagggagcttagtcatccttttgcaaagggtgcaagctctgatgtcatcagccgtgtccagccgctcaagaatgttgagaagaacgtcattaggcagagtggtgagcctatccttatcctttacagagtggcaagctggtttctacattgaattatcattgcattgcatttagtattgccgaaaaactaaactaacaaagtgtaggagaatcaatcaaatcaatgcgaaggaagagaagaaagaggctacttacattgcggcgacctttcttgttcttcgccatttgatacgaggcttatcaatattgacttgacttgttgtacaagtgtcggtgggtgttgtttggataccgggaacacctcgcctctctatctattttatttagtttagagaaagagaaataaataggaatcctattccaacaaactgattgcttctggacctcctgccggcacccaaacacaaacgaaattgttgttggaagtcgattctatttcgaagagaccttttacggtgcttgaaaggtacccaaggtacctctcctcaacttaaacatccaccgttgattctcaaagagtatattaggaattggattaacataaatatgggcagtttagtaatttttctttagccatcgtgattaactgttctttatctttggttatatcttcctgcaagcttgcacacataccccgaccttcttttcactgagttttgaacgctatatgatggatgactccaatttcaaaactagaatttatacgtccatccatctctattgtctttagaaagtaatccatacaaagagatggagggacatcgatcaatttttcatttagaagtctttacaatcacttgcaaatctcatgtatatatatggaaagacgcgcgaatcaattacctagttctaatcatcaattatgtggtcttcaattagcatgtagttatacgatctgcaaacactaatcaagtactcctaggcatgtgcattggcaccaacggactgaagacgttattgtctctccgcgctccggccggaccaaattacatatctaacatttatgaaatatataaaccaaattacatatctaaccttttcctagtaatacctggcccacacttttaagtatcttttcataggtaccttctactgtgaatcgttagattggaagtcatcaacggatttggtgcactccaagcacggtagaaaatctacatagcaagtggcggcgctcacccctcgaactccaagggacgtggatggggatgggttgggctcagtctccttgcctttggcccaacacaattagtcggcctgctgcccaatagaatcatccgatccgacgacaggcggccgggccgacgtcctcctgctccgcctcttcaattcacgcgccaccatgtcgcgtcgccgcctgccggcttccgcgctcgcctagccgtaccctgttgtatttacttgtgattcttgtgattttggatgtccggactgtaagaagtataatttctaataaaatccatcgcattcgtcccggacaccctgtcgtaccagccattggttctcctctccctcccgttcatggaacgtgagcgaaaccctcttcttccacgggcagtgagccccgtttgcctaccacgcgcacggctggattcgaggaaaaggtgccaacccaagtcgaaatatcagcaagtcgagttgagttcgtgttctaactacaaccgtatctagtcagagcttctttttcttcatgcataacactcgagccgtcaggcaggcaggaggtcgatcaagcaacaacagagcaggcatgcaggatcacccgcatcgcccgatgaagaataagaaattaaggtcaccgccgccacaacaacgtaagctagctgccctcttccttccttcgagttgatttgtttgattttcggcgacctatactatatctgaatgcaatattgcaacggtaaattggtgatgcaacgtagaaaccagcttgcaaccccgtatagaaggatgataggctcaccaccatgcctaataatgttcactcaacatcctcgagaggctagacatgggtgatgccataagaacttgcatcctgtgccaaggatgctaagctccctgccgagctcccccgcattgctgttcatgtcaattccttatgacactaggtgaaacatcgcgcgtgctgatgtgagagtttactatgataacaataagtaaaagttgttggaattaatgaatgggccttagcccactcgaagattaattctttggaaaaatcacaaaagcccacctcatgggatggcatgcatgtggagtttagtaccaccttgcttattctaggagagggggacctccttaaaaggaaggatgccctcctagccacttgaagcatgtgtggtggagagaagaggggaaacacacgcgcgcgctcgctcgcctcgccgggccgggtcggcggcgcgcgtgcacgacgtacgcgtcgaatggtccgacgaaaaattggctcctcacccttgcgcagatgcagcctccttttgcagttttgttttgctgcaaattcggattagttttgttttgctgcaaattcggattcgtttttgttttggaaacgttccgaaaaatccggtgcgtgcaaacggcgtggagtccggataagttacgcgcgacttatccggttcggttacgcgcagtagagatcgtgcgggcgccctgatcaagcgacccttctctatataaaccgacttgccgtcttcacgcaacacttgcgaaaacaatctagggtttgtctcctactctgtactgcgccgtcgctcgtagactactccatcccgctcgccggcgtgcaccggcgatcgggagagcaggtctccggaacctctgtcttcgacgttctgcaccgggagaaggcggcaataaggtttttgggaagcgcttcgcgcgactgctccctgttcgttcgcgacggctcgccttcctcttcgctcgcgtgtttcgtgccttcgtagacacctgcgaaaagtttcgaccaagcaaccggtctttccgtcacctcggtacgtgttcaatatgttgcgcatatttgatctgttcatgttatactgtgtagtttacatgtatagatctaatgatgcgttcatgctagttttcatctgtaatgtcatgatttatttatggaatagattaaatcattatatgtctataatctcaacaaaagtaatgtgtaagatagcttaaacaacatttgtttacataagttgatgtgatttaaatttaaatagtacgtagaataatgattcaaatataaaactaagatgatgtggctttacagagaacaaattaaaatacgaaagataatttagaccatatgtctaagagctaaaaaaaattgagatgatgttgcttgatgagagaagaaaagaagaaagataatttgaaccatagattaatcatctaaggactaaaagcaatttatgtaatatgacttaataagagaaaagaaaaataatatgaactaagtgagtatgaactatatagatatatagcatattataaaaaaaatgatggagagatatattaaaatattatgtgggtttgatttaacatgcttacattttaaatctctaaaatttaataaattattaaattatagataatataacatgtttgcatgatgcttacatgtaccagttgacagcgagacgtctgtggtgacttcgtcaatctcaagaatatgtcggcccagtcttcgaagatgctcataggggtagggtttgcgtgcgtgcgttcatatgggtgagtgtgcgtgcgttgcactgagtaattctcaaaaaaaattgttagtggatgatgatgtgacatctttgcatgttaagttttaggaattagtaggttataactatatagtaagagatgattaagtggtgtggttcggatgaatgacgtcgtggctaatgcaatagacaaacttctcaactccaggagtcaacatatcatccttcgtcaacttagcttgcgattctacctggggtactacggttgtcttaccatcggaaaagcactgcaacaagccatgtccacatgcaatctcaaaactgcgagttcacaatcctaccagagaaggaatgagacccctgtgaagaaacgaacatgctctacattttttttgtggaggctaacttgttttccttgtttctgttcctgttgtcggcataaatataaattagctgattcctgtaggaacataacctcggcatggtgtttcagcatcacaggccaaacgacggagccctgcaatattgaacgatgtccaatatgatgcttaagatgaaagcgttgcttgtgcatttaattgaaataagcatacaagttagttttgtgtgtttgtacttcaaagccagaagtttgtatgttggtaacaaacaatataatccgtcgatgggattgatgcaatggcgttaccaacaatagaattcgtcaatgaccgcgatgtgatggtctcaaataatacccaaggtaaacactaaagctaggaggcagaaaggttccatgggccggtgcaagccaaaatccctacaaagcattcaagcgagatactaggtgtccaccgagttcacagtcctaactatgaagtgaaactgctgagctcacaatcctaactgaaaagcaaaactactcagctcacaatcctaactgagaagcaaacagaccgttatgagaaactgacatgctctaaactcaagaaaatgataatacatttaccatatgagtctttaacgacacatatcaccttctccaaccacgacattgacaattgcattcatgttgatcatctgaggactatagctttgatcaaacaccattagtcctctctaatcgcaagcaatctcatgcatggaagtcatgtggagaacttgatgaaggaagcctggagcaagattgaaggtgaactagtaggatggttgccatgaccaaggtcgagcatatgacgtggatgaaggaaatgataagtttagatgatgaaggaacaattaaggtcattgtgggtatttgacatcatgtttttggtaaacaaatataaaaaaaggaaacatgacaattttggatggaatgatatttcaatactatgaaccaattctaatctaacaaggaggaaacctacataacaataagatcaatgctatagaactaaaattgtgatatctgaatgctacaaaatcaaatttgttaaacttttaatgattttagacattgtacaagtttgtgaaattgttccttagtttgtagcctttcacaaacaacaactttgtggctctaaaactattctattacatgtgtccatgaaaattgtgttttgtatagattggagatattcattaggtgaaagatatatttatatacaatatttagaagcagataaaaatgttgttgttccaagataattgataatggatatatatttggttttggtatactatgtgacacatgacaaaaatccaactgctgagtgtcactataaattattccatttaccatatgaagtcacttgacattaaaatcgtcatatgatctattaaggacccaagtagatacattatcaaaacaattgaatgactatatattttttttctaaattggtcgggttcaacttatctttatttatctcatactaatattataggttttatataaagtaaattgcatcagtagtacaagaacttggcaggtgggtgcgatttagtgcaacaacttgaaaaatgtgcaggccggtacatgaacttggcaatcaagtgcattttggtcaaaacgctgttacatataaatgattcaacatattttgtttcttctattatatttgtttcttctattataagcatactactagattattggtcatgagtacaattgaatatgtttgactaataaaatcacttggaaattatgttacaaccatttttatgcacttagttttaacgattattatatttttcggtttcaaatgacatactattttttagttttaacgatcattatatttttcggtttcaaatcaacatgctactttttattataagcaagcaaacttggaccatgatagacgtcattttgatgggtagacaaacctggaccttatgttatgttgccattttgattactgtatctcactgagtaggcaactatgatggagtataatctaatttctgtcgtgctttttctttggttactgtccaataatactttttttatttatgttgcagtaaatttttctttggttagtaattcaataataaatgtcaaataatacttttttgtatttatgttgtagtaaatttttctttggttaataattcaataataaactttaacggtaaacaactcaagtaaaagctcagcctgttcatacgctggttgggttggtttagttggttccgcagccgaaccagcaactggatggttttagccggtttgggctggttctagcaaatttgagggatgctgagttggtgggttggtttgggtggttgaccggtttagacggtttgagcccgtttaaattgtttattagaactgcacaactacactagctactacgatagctcttatatccacacttttataatctatcctgaaaattgagaaggaagaagcaattggcactaaactcgcaatgcaatgaccaatatatatacctcatttgcatgaaagttcttgtctaatgctctctgttttgtaccaatcaattctgatacaacagaaggttcaacctctaacactggccatccagaatattaagatttctttcacatacacagatgagctgagttggagattggttcatggtttacctgaaagtgtgagaggatggagcacccgctgcaatgctgcactaggttcgccgcctagagatccgtcgcaaggttgcctaccagggaggcaggaacagcttccctgagcccaatttctaccgcgccgccgccgccgcacgctcgcacgagggtttcgatgggagtatcaaattgggatgggttatatagtttcgctggttctatctctccctgaacacaacccatgtgatgctttaatagttttgacctaaaaaccgatgaagctggtaaaatcgctaagaacgggttggtccagtttgggttcgcgatttgtgctgagttcgcttgacctgtgaacaggctgagtaaaagccatatcacaatttcctggtaaaatgctagaatcttggccactgcttcacaattctgtacactcctattcatgtccaaacattcatgttgtgttttaattgttgttgttgttgctgatttaattttgtccttgaatttggtgtgttttaattgttgttgctgttactgatttaattttgtccttgaatctatttgtagaggagatgctcaacctggggggcctttcttcaaaggcaaaggcctgggagaagcgaggttagtcacttattcagttcctgcttattttccttttaatggtcacatgttttctgccctcaccgccctttatccgctatccgcagtgaagaagctgaacatcagtaacaatggtgtgtacccggcggcatccgcgaagaagcacaggagtagcgagatgttgagaactctgtcgttaggagtagcgagatgttgagaactctcattaggagtagcgagagatactctgttcctgactattgatgttgagaactctgtcattaggagtagcgagatgttgagaactctgtcattaggagtagtgagatgttgagaactctcgagatgttgagaactctcattaggagtagcgagaatactctgtccctgattgttgatgttgagaactctgtcattaggagtagcgagatgttgagaactctatcattaggagtagcgagagatactctgtccctggccataaatagtcgttgagaactctatcggtctaataagaccttatatcttctgctgcagtatcagctatttatgtgacgtctcattgttggtttgcttgagaaatgagaactagttatttaaatgtcagttttgcttggcttgagttcatttcagctttgcccggtgctgctgctgtaggcatgtaggagcatgcaggaggagctagaggtgttattctgttatgcggtgttattctgttaagcttttatatatatatatatatatatatatatatatatatatatatatatatatatatatatatatataaaagaaaatcgagaaggtgttttagagtaaggtcaataaaaaagcccgctattggttgtgataagtgaacatgtcgcctatagtaagcgttatagctaagacatacaatagagatatcatatacttgtaacataaatattttattgttttacgggcccaccatcttctcctcttctccttcttctcatccttacatggacgcctcttctcatccttacacggacgccggcaacggagaaggtggcggtgaacatgggtgacaacgatggctgtgaatgcggacgagggcggcggcgaccgctgtggacaaggggagggtgatggcgttgatggacaagggcgacgttgtcgacagccacggcggccgcagactaggacgacgtccgccgtggacgaggacggcgggacgagtgcaggcaacggcgacggctgcggtggacgaggacggcgaccgcgggcgtggacgaggacaaccgcggaggacgaggacagcgcgacggatgcgagcgacggcggcaaacgcgagtgatgatggtggggcggacatgagggacgaggacggcgaccgcttgcgaggatggcgggacggccgcgggcgatggcggtggttgtcgtagaagaggacggcgggagggacatgggccatcgcgcgaaggacgaggacggcgaccgcgggcgaggatggtgggacagccgcaggcgatggcggcggccgccgaggacgatgacgatcaaggaaaacggtgacggcgattgcagccgaggacaaggacgggcggctgccatggctgcgggcgagggtggcggtacggtggcggccgaggaagatggcgacgatggtggctggggaagacggcgacgatgacgacacgaaagacgaagaaggcggctgcggccgaggacgaggacgggcggccgtgggctgcgggcgagggtggcgggacggtggcggtcgcggaagacggcggcggcggcggccggggaagacggcgacggcggcggccggggaagacgggaacggcggcggccgggaaagatggcgacgatggcgacgcggaagacggcgataatggcgaagcggaaggacgcgtggaggcacgggcgctgcttgcgctaccatcgcggcgggcccacgtctcgggccacgcatatcgcccggcggttaattagtcgcccgccggctctctctctcttccagatcagcaaaaaaaaaatcctacgtgaacctcctaacgctcattattgtacagtagagttttcaaaacacccgcattttgtagcaagggtatacgaaatgttgcaaggaggcaggaatgtgtgtgcccacggttttgagtttgagagacgaaaccacgggccgcggaccaaactccagcctcctccacacgagcctcagcccagtagtgatactgacctgacttgcttcccttcctccgaatcgagacacgtcgccatcgtcgtcgtcttccacccgctgctcgtttcctcgtcgcgtcgcgcgggagatctctctctctccctcccttccattaaggtaatcaatcaaccatggcgccctcccgcccgctcatgcgcgggatccgcccgccgcgcgtcttccccacccgcggcggccgcacctcgcccttggccctcgccctcgccgccctcctcctcgcctccgccttgctcctcgccctcatcgccttcggcgtcttctccctcccggtctccgcccccaacgccgccaccaccgactccgccgccgccgggggagacgccgagcccgccgatccacggcccccgcgcacccgcgcccgccgcgaccttaggtaaggggccgggttcccccccctccccctgctgccataatatctccagatttgcttcctccttcgatctgccgctgctaaccgtttctctcttggtttctctggagcagcgagggccttggggaacgaggagcacaatggacggaagtcatatcatgggagcccagggctttcgtctatcacaatttcctggtaaaataatctgctctctacacttgttcattcatctgcatcctctcctcgcataccgggatggcaacaacaatggtgttcactgaatgcatgttatgagaatggaatgatagtactgatagttcacgctttgttgcctgatagtactgataattatttacttttctgcactttttgttgcctgatagttcacgctccaataactctgatagtttacaattcatttttgttaaactgtatgaattgctgatggcttatctcttttgttagtccaaggaagagtgtgattacttgattggattggccaagcctcacatggtcaaatccacggttgttgatagcactactggtaaaagcaaggacagcagggtacgcacaagttcaggcatgtttctccaaaggggacgagacaaggttattcgggccattgaaaagaggatagcagactacactttcattcctatgggtatgtcatggctcaaatgttttctcttctgctatttcttttcacaaatgagccaaattcatagtgtggccatacatgtcctttttatttcttagtcatggatagtaccccattggcacgtaagaggtttatggcattgggttgttaacaatatgcagttcaataatgcaactctcaacatttccatatttttatcatgcgaaggtttttatcatgttgttgtaatcgcaataatgatttgattcattctggtttgcagaacatggagagggactccaagttctgcactatgaagtcgggcagaagtacgagcctcactttgactattttcttgatgagtacaacaccaagaatggtggtcagagaatggctactcttctgatgtatctgtacgtatggtactcatttataatgtattggttacaagtgttgttaactggatttctaattaactccttcacaatgttatcaatggaaacagatctgatgttgaagaagggggtgagactattttccctgatgcaaatgtgaacagcagttcattaccatggtataatgaactttcagagtgtgccagaaagggccttgctgtcaaaccaaagatgggagatgcgcttcttttttggagcatgaaaccagatgccactctagaccctttaagtttgcatggtcagttcagtgacttatctgctgttcttattactttttttaaactgattgcatgacttgaagcctgctgggcacttctgttctatttgctatgtcctgtttaaaacttccatcgatgctccttcagatactttacgtgtgttttatatgctccaagcagtccctttacaaatttctttatggtctgagcagggggttgtcctgtcatcaaaggaaacaaatggtcatcaaccaagtggatgcatgtccgtgagtacaaagcttgagctttctgaagtcgtgattaccaaaggtatctagtgttcctatggatctgtactgagtaagatgtaaagctggcgatattactgcatattgctttcttaactagttttggtcctcttcaaagtgacttccactcattcaccctagcaccagaaacccaggaagcaatatggctttgaggttatctagcacctttagctttgcattcttctcttttcgtgattactcctaggataggagtcatgcattcagatagtgttctatgtaaattttcagctgaggatggttaacgtttgcttgtagtagcttgatatctgccactttgtgagatctttactatctgaagaaataatttgctcaaaacttgttttataaactgatgtgctgtatctttctttggcagatggaccctatataaagcattgactggggcactttccaggatggcagttatgtaggctttagagatccacaccggtggtattctttgctctctgagaatatatagtagaggcactaagcaagggggtttacttgtccataccgtgtttttggagatggtcttgttgaacctggcgccttttcttctttattttttctggcagactacagaggaatgaatggtccattgttggggacatagggtgtggcgtttgatttagtttgttttgtggtgtattgctatctgctaatgttagtagcttaattatgtacactgttgagctaagttgtcattactatagagctctctcctatacatgaggggaggtgacatgattttggtgtgcctttttctgtcggtggtggtgctgctgggttgtggtcatacaatccaggtgcagacatgatgtattgtttgcgaatttattatattttttcagtctaaccctgaggaaaaggaatctttggtggtgtggaataggcaaaatacgttgggtggcataatgttagatgaagtgattgatacacaggtggttgtagaggtaacgttgagtgatcaagtgcaggcttgctggagcaaaaagaagatgatgcctcactcagtcgttgacggcacaatctagctaacctgctgccattgtggtgattcatgcctcctctccgaagactctttgacttgtactaatggagtggactgctaccaaacacgcatgaatagacgaccagatcatcatacaattcatcaaaattagcactcctagtttcaaactacttaacaaaggaaattcaacaaacttcattaaaatagtgtagtgtatttttttctttaaaaaaaaattgccaacgccaatcgcggagtttcacatggaggagggaagaatggaatgagcgccaggcgtcgcgtcggcgcgcgcgtgagtgcgtgatttgtgttggttgtcttcctcttggcttcgcttcgctgctttgccgcgccttcgccgagggaggccgaccaacgcatcaatcaaacacacaagcacaccacgcggacgcagcagcaggggaggagacaatttcctattcttcctcgccccgcgtcgcctcgcctgagtctgactctccaaacgccgaccagtgacgccgcgagccttgccccttgcccgcgcagatctcaccaaaccctaccagatctgcgccccgccatggactccgccgccggcggtggcggcctcacggccatccgcctgccctaccgccacctccgcgacgccgagatggagctcgtcagcctcaacggcggcaccccccgcggaggctcccccaaggaccccgacgccacgcaccagcaggggccccccgccgcccgtaccaccaccaccaggaagctcgtcctcgcctgcatggtcgccgccggcgtgcagttcggctgggcgcttcagctctcgctcctcacgccctacatccaggtatacccactaccctttgctctcccttctgcttcagaatggagagtatccgcatttgggaacgggaacggatcgcccatatatgcgtggcttgatgctcccttttctgtttctgctgacgcaaccgtattagagcaccaaaattcgcgccctacatattttgtgctttgaatgcaactgcttactgaaatcaaggttgctgccaaatggcaataagtgaaaaatcagccaggggaagacttgcctgcttaggaatttcgataccgtaaatttcgatacacaggagaggtttaactagatgaaaaattcacactcttcacatgtacatgttagagaaatggtttcttaacaccgaataacttggtgggctaatgagtttttaggtagtatatctgtttcacatgacacatctttcagatctatttacagctattcattgttgattttgatgcagaccctaggaatagaccatgccatggcatcattcatttggctttgtggacctattactggttttgtggtaagtttctgcaataattaaattcctcttttttttttgtttcataaccaggcatgtccaacactccaaacacaatagtatattaatgtcccgtgattctctgcaggttcaaccatgtgttggtgtctggagtgacaaatgccgttcaaagtatggaagaaggagaccgttcattttggctggatgcttgatgatatgctttgctgtgagttagatgaagtttgataggttatcatatgttcccattctttctgtgctctaataggaagaaattcatacgtaggtaactttaatcggattttctgcagaccttggttacattttaggagataccactgagcactgcaggtaatctttgatacttctacttcctttgatagttttcttcacatcaagtgtgccgccactaaaatgacgagtactgtttgttcagtacatataaaggttcaagatttcgagcagctattattttcgttcttgggttctggatgttggatctcgcaaacaatacagttcaagtaagcctcttcaaaagtttgcttgtcgtcatttgtatttgcaccaaatttgtcaaaatatatgccatgaattaattggattacctcaccatggatgttctctaatatcctgtttctcctttcctttttccctacatacagggtcctgctcgtgcccttttagctgacctttcaggtagttaatgttttcattttgaatgtctaccatactggacccacttaaatatcagtgactaaatgatataccttctattacgtaggtcctgatcagtgtaattctgcaaatgcaattttttgcacatggatggctgttggaaacgttcttggtttttcatctggtgctagtgggaattggcacaagtacgtacttcatgtgtcctttatgtgcttatgtttacttgaagtttgttgctcataagtttgcgctgtcctatacatgctactgttggtaaagggttgaattgacttgttctactcaacccaaatggatcattgtacaattggtaacatctgacggctggtagtcaatctgtattaataaacaaaagctatatatacatttagcaatttcagtaccatttgtttcaaatactggtgatgttgtttaccctttgaatgatacaagagtagcgtatgaacaagcaaatcacggtaaaacattgtctcagcatctttctcttctgtggagagagtatcctatcacatgttgaaaagtactatacggtgattacctgtttgaaaggactactgtcttggtcctcttgtttaggcatcttgcttgatgaagtccctctagttagtaaggttttttttggcatgaaatctgagtttatttctcataattattgcaggtggtttccttttctaatgacaagagcatgctgtgaagcttgtagtaatttgaaagccgcttttctggttgcagttgtaagttctcttaaatcccgctgctgcgcctgcagtagaaatttcaagctgttttgtaacagcctgcagagctagcaggtcattcttaggaattgcatgtgatattattttgtggagtgtggactgtaatgtgtgcaagctgataagccctactatgcaggtattccttttgttttgtatgtctgttaccctgtactttgctgaagagatcccgctggaaccaacagatgcacaacgattatctgattctgcgcctctcctgaatggttctagagatgataacaatgcatcaaatgaacctcgtaatggagcacttcctaatggtcatacagatggaagcaatgtcccagctaactccaacgctgaggactccaattcaaacagagagaatgtcgaagttttcaatgatggaccaggagcagttttggtgaatattttgactagcatgaggcatctacctcctggaatgtactctgttcttctagttatggctctaacatgggtatgctaccttaagacatctatgcatgtatatcagctgcatgctgattgtctcttactgttttggaatttgtagattgatggtgttcatccatatcgtttgctttgcagttgtcgtggtttccctttttcctttttgatactgactggatgggacgtgaggtttaccatggggacccaaatggcaacttgagtgaaaggaaagcttatgacaacggtgtccgagaaggtgcatttggtttgctattgaattcagtaagaacccttgatcaatgtgtttactataatttgtagtatgtcgctatgtttagatgctgttacaccccaatcatttctagcctttctgtatttttattggatactgctagttgttgctcttactctatcaaacaactagctgaaagtcttaaaacttagttcatgtgctttcctattctttgtgccctgtagtggtttaagcatttcagttggattctagtttgaggtgataagttggtggcttcaacgtttgggtctttaatacaggttgtccttggaattgggtccttccttgttgatccactatgccgactgatgggtgctagactggtttgggcaatcagcaacttcacagtgtttatctgcatgctggctacagcaatattaagttggatctcttttgatttgtactcaagtaaacttcaccacatcattggagcaaataaaacagtgaagaattcagccttgattgttttctccctacttggactgccactctcggtaagtaccagacttcacaaaatcctgccttgttgggttggaagctttcttacacttggctcttgaatgtcacagatcacatatagcgttcctttttctgtgactgctgagctgactgctggaacaggaggtggacaaggtttgtgttgctgatgtttttttcttttacactatgctcatgtgattctcattgattgaggatattttttttatcaatctccaggtctggcaacaggagtcctgaaccttgcaatcgttgttccgcaggttagcatgttcataagaaacaaaatgtatttctatatgtgctgtcactgaagatgtcttgaccatttaatactccattattctgtgcagatagtagtgtcactaggagcaggtccatgggatgctctctttgggggagggaacgtccctgctttcgccttggcttccgttttctcactaggagctggtgtcctcgcggtccttaagctacccaagctgccaaactcttacagatctgctgggttccatggatttggctgagcagaacaccagccgcatggtgtgtaacattgagaaatgcaactccattttgccattcgtttacagtgaaatgattctttttacctactactacaacagaataagctgaaaagatagagattaggatagagagctaggtaactagtccagttaggttgatgtgcatacaaggcaattggaaggtgtaagagctgtatctacttttttgacagaaaaatgtaagctctgcccgaatgacatggcggatagattttacaatggatgtaatcatgtactatatataacacgttttggtcacagcttgccaagtttcatgtatagtactgctactacttgctgtgtgtttctgaggaaaatttattagctgtctgatcttgagtagtacaaagctctcttctctttgagaaaagggtaataatgtacgcctacttaaattggcttaaaacatgctggggcatcaggttcatttctgagtgagatctacttataagaatcaaatgggatatatgtcccgaagatggtgaagtggcagatgttttttttcttttaactccggaaacaaaatgaagtcacaattgctttatgcaaagtgatacatacagtaaatcgacgaaaaaacaaagaggaaaaaaaaggggagtttgcaactttgcatagacgtgggacggtctatcatgggccattgttggcccggcccacgagcccaaccgacctacacaacccaactaacaaaaaagcgaggcagaggcacatctcttcctccctctcgactctggacctctcctctccacgccgaccgccatggccgccgccgccgaggtcgacgcggcccccgacctccccaacggatcctccgccaccgccacaaccgacaagaagaagtcgcgggagagcgagcgccgccgccgccgccgcaagcagaagaagaacaaggccgcgtccaacgccgcagatgcggatgcggccggggacgccggggccgacgacgacgccgccgaggagaagcctgatgtcaaaccccaggtacagccacagggagcgcctctctctttgttcttagggtttgggggggttcatgtttttttcttttttccttttctttttgcttgtttggtctgacctaggaaccgtggttgccgcaggtggaggtggaggtggagtacgtcccggagcaggcggacctggacgacggcctcctcgccgacttcaagagcatcttcgacaagttcaccttcaaggattcctctgccgacgccgaggtattaccgcttcctcttgtgctgctacggaagacaaaccgatcgatataagattcctctctcatgcttcaattttgcctgctctatgtggagaaattgacaagtggattggtatttttctgataggatgacgagaagaaagatgaggctggcactgatgccgcaaagaaggctgcagggtctgattcggacgacgacgagcaggggacacagcaaaagaaggaagggggcttgtccaacaagcaaaagaaagttcgttcttcgcatctccctattgttgataacatgtttcagtgcctccatcttccttctatgttaattcaccttaagcttaagtttttctttccgttttttagctacaacgaaggatgaagattgcagaactgaaacagatatgcaatagacctgatgttgtggaggtaagctacccttattagttatgctaagattaactggtagttggctgcttgatgtacatctgtttgagtgtgttgtcactatgttatgtcgtaattgctcatctagggtgtcactgccagcgctgccagatataggtgaatctgaagtgaattcacaacaatgtgttgaaatgcaccacttataagattaaagcttctcaattctcaaacgtttttgtacattcattacctgtgcaaggggtacacccttctgttgttcacagttcctaatgctgggcattcttgtattttagcttcattgaacatacatagtaatgtgctgcatgtatttttcttgattcttgagggtagaattgttacataaattccctagcaattgcagcaaatgtcttcatggtgcacacacttgtaccagtattgctatattggagtgcaaacataaatattacttttatcttattgaggaaaatgaagcaacgggaatgacaccagtaaagtagttctatgtaaacttgttgattaatctttgtttgagacatctgtattcttcttgctaggtctgggatgcaacggcatcggatccatcattacttgtctatctgaagtcctacaggaacactgtacctgtcccaaggcattggtgtcaaaagcgcaaattcttgcaggtttgtgattacctaccaacctgccatcaatgacaaccatgttgttttgcataatattaatgaagaacagtgcttctgtgcgctcctaaaaaattgcacacaaatttaaatgttgttgttagtactggagttcctattaagtagttgcgactgtcattcaaagccatcattttgcttcaaaactcacctgtagaagagttgaatagtttttctgaatcattttagtggagtttgatgtggaacaatttactcaaaaagaggtgtggatggggagtgaggggacataatgttgataaatttacacccctcttatacagatgcaattcttgcagggatgctgtaacaacctgggagcaagagcttcatggtgcaatacttgactgatttgtatagcataaactttaagggtgtcacatctagttaattcatgtggcattttctgagagagaaattttagtctagcctgggtctatccgtctatgtctcttgttgcttgcatatatgaacttgtcattttctctagccattacatagccttttttaatattcaatgcgcgaagctgtattttgcatggagcattgcctttatttgttgatttatttccttgtccagattttatgccaccttattgtctcttgcagggtaagcgaggtatcgagaaacaaccttttcaactccctgacttcatcgctgcaactggaatagaaaaaataagacaggtaacttgattatctcgattcttttaggcttttcttgggacatgataccagcttactttaggagctgtgtggtgctcgaattttatttaaatttctttttttttcaggcatatattgagaaggaggatagtaaaaagttgaaacaaaagcagcgggagcgtatgcaaccaaaaatgggcaagatggatatagattatcaggtaaaaatttactcctattgtctatagagatcatttgatggtatcaacatttattgtaaacacacattttcatactctttccttaagctcaagttctaataatgttgaatttttctgcttttctttttgagactggtaatgggtgttacagactgttttagtcctaatgcagcattacagcacacatgtttatgttaagctcaaaattcagggtgttttaactattcaacccaaaatctagagtaatttatctcatatatccagctggggcctgagttatcaactcctgacatgattcacaggcaggaaaaataagtctcaccttgatttcgttggtacaggtcttgcatgacgccttcttcaaataccaaacaaagccaaaattgactagtcatggtgacctgtattatgaagggaaagagtttgaggtacttttacattatctttcatgctgatatatataaaagaatcgagataattggtaactgtctgcacaatccatttatctgtgttttcgtacattgagtatttgaatttgttgctttgtacatgtggacttaataggtcaagcttagggaaatgaagccaggcatgctgtcgcgagaacttaaagaggctcttggtatgcctgatggtgcgccacctccatggcttataaacatgcaggtatttttctgaagaacaatttccatgtatccggtgttctagttgagaagttctctatgtcaactgataacattaaattttggcagagatatggtcctccgccctcttatcctcagctgaagattcctgggctaaatgctccgattcctcctggtgctagcttcggataccgacctggggaatggggaaaacctcctgttgatgaggtatatcacatgttagatccgcccctggcggactctgacttactaaaatgcagtctttaaccaacatgcatctcttactaattttgttcttttggaaaacagcatgggcgccccttatatggagatgtttttggagtcctacagcaggatgaacctaattatgatgtatgtctatttttatattttattgtttgagctgaatacaagaactgactgttgttctattttgtattgcaggaagaacctgttgatcgcagcaagcactggggagacttggaggaggaagaggaggaggaggaagaagaggaggaagaggaggaagaagagccaatggaagatgaagacatggaagacggcatgcaatctgttgacaccatctcaaggtgctaccataattctttgatgccttacttagtttttctttcccaaataaagaactatgtattgatgtttgttttgctgatagcactccaactggtgtggaaacacctgatgtgattgatcttcggaagctgcagcggaaagagcctgaaaagcagaccgagaagcaactataccaggtgaggactttgccttcaattgtttgtggcatctcaggatacagacctttaaattggttttgttcagtctataaccgacctttttgtcctttttctttgaagattcttgagcaaaaagaagaaagaattgctcctggggctatctatggatcaagccatacgtatgttacattaactactacctagttacccaacgtcaaacttttcttatggtattccatccaatttgacgatatgaattaactcttatggaatcttgttgcttttgcaggtatgcgattggtgcacaggataaggctggtcctaaaagggtaggcttcatagtcctttgcactatgtttacaagtggtttcactgaatgcgtgctttaatgatttttggttgtggaccactgcaggtggatcttctcaagaatcagaagtctgataaggtggatgtcaccatacaacctgaggagcttgaagttatggatgatgttttggctgccaagtaagattttgtgttgtcaatgcattgtgaagttgagatggtgctaatcacagcgagtggaagatgctaacactttataccatgtacacaggtacgaggaagcccgggaggaggagaagctacggaaccagaaggaagatttcagcgacatggtggcggaggtacattcttcccattgtcaccaactaagaagcatgagctttttgttgtttttattccttggtggtgtgtccctatgtcgctaacaatagggcatatgtgcattttgcagaacgcaagcaagaggaagaggaagcaggagaaggacgggaagtcgaagaagaaagacttcaagttctagatgttgccctttgcgagttagccagatccaaggaagaggaggcggcacggcatccatctgtttttttagattgcccttgtctgagaatagatgaatgcgtaggcacgagtgtagcagcagcacagcccttttttatgtgtgtgtgtattgtatgactgatggccttcaccttgatatgatgatgatgtttactttactggacaattatcgtgtagtagaggacagagagcgttacgttctcttttcacatactagtaacatcttcttagcttccgtgtcatgtttctttttgttatcttttcctttgctgagaggaggcattctttgcctttctcagcccaggtgacaggcagtccacatccttatcgctctttgctagttagcgctaattctctttagctagtatctaaacaaggcgatattcatgaccagccggaataaggttaccatattttaaatctaacttgaaaaatacaaaacatctctgtccactcgaaactgctagtatacaaaatggatttatcttataaactactctgggactgaacatgtttgaccgttcgtcttattcaaaaatttttgtgaaatatgtaagactatacgtgtacatgaaagtatatttaacaatgaatcaaatgatatgaaaagaataaataattacttaaattttttgaataagacgaatggtcaaacacgtactaaaaaagtcaacggtgtcaaatattttgaaacggaggaagtagtatacatgttgtgatgaaataaattgtagagagttgagttgaagaagagggtgtggccggagacaatttgggctctcgtccacgagtctcccactctactcttcccctttcgcttgtgctttgggccactagtcctcttcattggtcttttgttcccaatcacaaacgaaagcgcaccatgcatggctaccatggctgcatattcctttcacgattacctttcattccaaactctctttgattaccttctattttagagagagattgatcagcagctggttcatattgcatttgaataactagcgtatcaaggattgcattgtactagctaggaggagcattggtcgcttctgggcgattcgattcgattcgaggatggagaagaagaagagtaataccgataacaacctggaggtgttcctccaggccgccactccatgcctgcgctggcgctccgcctccatggtatacattctgctcaaattaacatctctcctgcccttgcatactttcagcaaacaaattatcatctctatttctctctcttcttcttcttcttcttcttcttcttcttcttcttcttcttctttcaatattcaataatgtaggaatgtttccaagatcccagcaaagtttggcaactcgacaagaagaaagacgaggtcgattacttcgcgcttgaggatctctgggagcattacgctgagagcagtgcgtatggccttgctgttcctgtccgtcttgaatccggcaacaccatcacccaacattttgttccctacttatctgccattcagatatacacctccaccaagtctctccttgctttctccaggttcgttgctactctctctacctctcaatctcatgtctcttgtagctgtatgcaacctacctgtacattgttttactttactgcaaacccttaatcctctttggcctattaattgtttccgatctgatcgaactaatgccattcgatgaaatcatacagaggcagcgcagggagcgagagtgattcttggagtgatgatagtacaggcgacaagttatcaagatcatgggatgctgctatgtctgatgacgacgactcaagccatgatagctctgaatcggtttctgcaaagcaaggtgccggctgcctgaattttcagtacaacgagtggagctcgccctacgagagagtcccgctagcagataaggttactagttttgtttcagtcttcaatgtgatcaatgcaaataacttaccacattagtactctaattaagtttggtgttgcatacgttgtgttattgattaggtggcagagctggctcagcattatccatgcttgacatctctcagcagtgcacaactttcaccttcgagctggatgtctgtagcatggtacttgaatttacacatcattttcacttctttgattgttaaattattgctctgaagctagaggttcaaatgcatacataattgcacattacatctaatgtatattcagaaaactaaacaaaggaacagcttgttgagatgcttgacttgaactcaactaatcttgtcaacaataatctgcatgcattcaggtacccgatttatcatatcccagctcgtggaaacctcaaggggttatctacgtgtttcctaacctatcattccctctcctcagttttccaaggtacgtaatccatccacatattacatactcctatataacatcaattcgttaatcttgtggctgtgatatgtgcattactgacagtgtaattagatcgatgttgatgatggaaatgcatgggctaatttgcagataatgttgaggaggggaggagcgttgttggtgtttcgccgtttgggctggcgacgtacagagcggaagggaagctgtggacatcgtcgaggagctctgatctcttctgggcagcgtcttcttggctcaagcagctgcgagcttaccatcctgacttcatcttcttcacgtctcactgccggcaatctgcattctgaacctgacgcttgttgcttaagcttaattatactcgatactcagcctccggtggtgctagaagaaggccaaactaggatggaggaaattgttttgtcagtcaccttgcgagctatactgaatttaaaggactttttttttttcatcaacagcaagtatgttgtactccttccgtcccataaaaaacaaatatagtaccggatgtgacacattctagtactataaatctagacaaacgtatgtctagattcgtattttataggacggagggagtagactacatcactctatcttcatagaattatgaacaggtacgaactacgtaggaattgttgctggtaatgacttgacagggaaaaagatcgacaatagagctggaaagataaattggatgtaaatgagaaatgagagtgtaaattgcttttttttcccttctctccaaggatgagagaaaatctcaaataaagtagccctccacgtcgtctatgaaaaacacgtgaaaatatggactatcccattcggttgataatattcaacatttggaataagattcggttacttataaaattccattcattgataatttttcaaatgtttaatttgaaacaaaagggatgacatgaagataattactttgaaatgtatatgagttgttactaggttttataacttgttctaatataagctggttgtaatattgggcctgcttgcagccgctgccttttttttttttgcttgcttcactgttcttacaaccgaacccgcccattaagagtgattgaatcttgttctaaacattaactttttttttatccgtggaagtatttaatttataggtagctaggaactcttgtcctctctattttttttcccaaattagtagcctaatttaattaattcggacgtttgaagcaaatactgtactagtagtatgattgcagcagcaagcaaagacgaagaattcaaacccaacccaacgcgtggcgtgaagcaacgaagcgaacgaaccactcaaagaaaaaagaaaaggtgcagtgatgggggcaccgacaagtgggtcccacccaccgcagagacaccgcgtgggacccacgcgccatcgtgtaaagtagacgagacgagacgacccaaccagcgaccgcgccatccttgcgtcttgcgtatcgggttcccccccaccccaaccttgtctctttacattccggtccctcccactcctacaaattatttacaaccaggtcctcaacctccacgtcgctcaccgtcgccgtcgccgtcgccgtacgtcttcggcggcgaggccatggccctcgccttcctgctgggattcctcctcggcctcctggctctggcggcgctcgaggccgccgcgctcctctggctcgtccgccgcctccgccgccgggactctgccccgcagcccgcgccggacgccgacgagctccccggcgaacgccccttcccgtacgagaagcaggtcaggctgcttccactcacgtacctctcgcttcgattaccctcctcggggataggggataggggatagggcgaatgcggcgcgctggaatactagtaacagtaactgcttctgcagctttggagctagggatcacctctcgattcgatctcctgtttttttttatcttactatgaaatagttgcagcttgcttccactgctaattacttacttgggaggagcaaaatgctactactgtgcattcatatgctaacaaggtttctttttccccaattgctgcacttcaactagagaatcgacatgcctttgtgttcagaccgcaatttttgtacatcctggatcgttcagttgttccaaatactaatatcagtgattgggttctgttattctggttattcatcgcaaaattttatgttccccttttgttatccaagcaaattgctcctagggttcatgcatgccatatatgtttacttcttaagttcctggccttttttttatttcaaattctaatttgctcctggcattgacctctacttagtttttggcccatgattctatccattggcatgcccagctcatacacctgctcatctcagtgtatattgttctcctgtgcggaaacacctacatgttctcatcttcatcacaagtgttgtacttgtacatgtagtagactccacaactaagcttaatgaattctctatggatgaactagtaggttacatgctgaagagacctaaacataatcgtttccttttggttccaattatcacagctgatacatgttcaccactgaccaatatacatacgacctggttatattttcatgaatgcaacgttttttttcctgtaacttcctttcaccatgatgttccttgtttttacatatttttgcactgcatctttatgctagttctgttttacatcatgggtactcaacattgagcttataaaggttgaacaatatggttcaaggaaaatatacttgcattttggataaaatggcttaaataccattgcaatccagagctcatccaaattgctttggcatactatatttgcaataacatttcatttagattcctctttagagcctccatgttttttagttactaaggatgatcctgcttaaaatagatgctgtatgtttacagggctttctgtggatactagagccagaaaagacacctaaagctagtaatgaacgctcatcgattggaggccctaaagaaacaaaggaaaaaaagaatattgtggaggtttttcctgcaaagaggtcggctaaaatcaaggggcgttcacttattttgtctggtcctgatggcttccacacaaccattaagcttctgaattgcacagtatttgctgtttcagcatcaagtatgccctctcgcaaatggtcagtatttggtgcaggagaaaatgatacttttcatcatgagctcatcttttttttacccctatccagtttccagttgtacacattgtgaatttacagtcaagtttaaccttgtgtcgcgatttgccaaataaaatttcagaggcatgtagaaatgcttttgtttgaaggtaaatcatgtatttgtacatgttggagccagcttatatggattttatttcttgaaggaactcctatagagacggaatgtacttctttagaagacagttagaagtacttgccaagcagctttctgttctgctcctttcattcagctgttttacttctgctactagggttttttttttgctcgtatacttcactctatgtgtaactttagtacctttgcttaactttcagggctaaaaggtatcctattaaactggaaagcaaggaatatcaaatttataatggaagcaaggtatgctatctttatgctgaaacttcctgggagaaggaatcatggtgtaaagcacttcgtcttgcagctactgctgacaaggagaaaaagaattggcatgccaagctgagcgaggagttcaataattacatatcatcattaaattctgaatacccaggtttcctaaagcctacagtattttctagtgaggaccatgaggttatggacagggcaataaagactgatgggtcttccaaggtccgtctctttctcaaaaagctggcaaagaaggcatctacaaaggttccgttagagggtaagacaagttccggatcatctacacaaggagaaagaaagatattggataaattacgcagctatcagggcacaccgtttattgaaggattaatgggttcacaagatgacaagtccaatagcagttcatcacaagatacagtgaaacccagtccaacgtctcctgctctgggtcaaattggacaaccttcagctttccctgatgtaaatgccgatgatagaatagcagatgaaggtacactttgttggaaccttttatcttcacggttgttttttgatgctaaaatgagcgatgagatacacaaggccatcaaagcacgcattcaggttagatatactgcttatgtttacaaagtaacctgctcttgtctgtacttgttaattagttgaattttattttgttagcgaacgttatcaagcatgaggaccccaccttatgttggtgacatcacacttgctgacttcagccttggaaagcttccaccttatgtacacgcgatgagagtccttccactggatttgaatgagttatgggcttttgaagttgattttgaatattctagtggaatactactgcacattgaaacaagactcgaggttcaggaaccagagttacagaaggacataatgaaaagtaactttggtacagactcaaatggagaggttgaatcagatcttcttgagagtattgaacaatacggtaaccaatttcgagattcccaaaattcagtttcctcagttgaagaaaaaggtgaaccaggtatgcttcaatttcatatatgtgttttcttgtttatttcatttgtttctttgagtaactgtttatgattgtcctaccaatgactgcattacaattaagagtaaaaagaatccaattagttatgatctaccgctggcatgatcagcttgttgttttcctgttttgcttatgtatgcttgtactgacttgatgtaagctttattacaattatggttagaaggttgcccagtcctctgatgcatcaagaatcaagatatgtttagtgatccagaccttgtgtgatcttttgtatcagatggtagtcagcccaagagcactggatggacatcggcctatatatcagggtggaaaaatatcatgcattccatagcagatcatgtctcacaggtttacacctctccttttggccttcatgcatctctttcctacgtgttacatgtttctgagcacatctcaggtcatctctgtatttgataagttgctcttaaaaactgtaacattagccttggtacatctctgccagtgaaatcgtacatcaaacttattttagaagcttaaagttatggagatttctctttaaaacaatatgaatatttcaccagtgatcttaagatcttcttgcacaggtgccgctctctctggcgataaaaatttcatctgttcgaggtgtcctgcgtgtgcatgtgaaacctcctccttctgatcaactctggtacggatttacatcaatgcctgatttagagtgggacatcgaatcttctattggtgataggaaaattaccaacagtcacattggctcgcttatcggtaacagattcaaggtagtgaacacatcccatcctcttctgagcttgttacttctcttccaacctacatgttttaatcacacctttctgctgctcaggcttcactccgtgacagtttggtgctcccaaactgtgaaagtatttccataccatttatgttggcagaaaaggatgactgggtacctctcaaggatgcaccttttatttggctcaatcgtgagcccactgagaccagaagccacgctgcagccgttacgccaacccggcctgacgaagttattctgaaggatgatgctagtaacaaaactgtggcgccaagtttgcccaattcgtcagcaagaagtgaggaaacacttaaaacagcagcatccattgatgagccaacccaagtgcctgtggcggcagcggatgcatcgcatgagccgaggaagactcccttggctccagctggtgaagcatcgtctccttccagtcctgacacaatcgacgagctgaggaagccattgctgatcacagaaaagattcaggaagaggattctgaaagcaaagtggagtctccctcgcccctgtacacatctctgagggggatagtgcctgcaggggagcaatctggagacgagtcgaagcgaaaaggcggcaggcgagctcggatgatggacttcgggaagaagatgggagacaagctggaggagaagaggcggcacatcgaagagaaggggcggaatatcgtagagaagatgcgcgagaatgccaggaccaacagcttcgataggtcaatgactagcagcagccatagcaatagccaaagccaatagctagctagctcgtttgtaaaactttggagatcgtttggtgccagtctttattcctggttcagatgtatagctaactttcctggacggtatgcatgcatgatttaatttttgatgtggaattccagaaaaatggtagctctgtgtaccattagcatcggacgtacgtgtgagtggcacgacacttctgcagctcgaactgggccttcgagcgatcgatttatcgagcaatgaaaaattcttggttatgtagatggaagagaagttgcgccaggtacatgcgcatgttggcctggttctgccgcgacactcagtacaggtcattcgaggagtacagtcagtaattgctcatgattttgtaactgtttgatataattgctacaatacattttactggattgttggattcagttctaatacaacctagaggaaaattaaaattatttacacacacgagcacaagatcaatctaggcacactaatcttggtcagtcgtccaaaaaatttctctgcttcaagtgaaaagtcttgccactataggccggagaatccccagaggcctggagtacatatgaaggcctccctcacatgaccattgcatatcactcctcggtacagctatatcttgaaatgcctgtatccgtaatcagagttcttcatcccctcttcccagtcgcccatttttttgccaccaaataccacttgtttgatgcccaagtgcctgaaatttttgtcaaagccacaatcacagcaaaagctaattacaatgcacaaacattttgaatacaaaaaagtaactcataatgtacgtgatgggcgatgaactacatattaggactgatctgtgacatattcagaaacaggcatgtgacaaactgacatgtttgcagagtgccagaaatttctacagtggtatattactctcacaattcagataacgtttcattttctctccgcaattgaactaaagactataggatcagatttatctccacaatcacaattgaactaaagactataggatcagatttgaagctatagctgctactgttttgtataaggtatagagaaagatgacttactctgagcttaattgtgtaagacagttgagtaatacatccaatccaagataatccgatgttccaagatccaccctgaatgaagagtgcattttcagtactgtagaacccataacacaatttccagactataaatgtttccaatcctcaccaaactctgccccaattgtcttggaattcgacatcactgatatcatggaaagatgaaggcatcacaccagaagcttgatcagaatcatatgaagggtcatagtccagcattgaattggccagctgaaattgaaatagacaaaattgcaagtcagcttgcatagataacacaccagtgttacataattgtgtaagcagttgataaaaaggtagcaccaaaaaggcatgtttacagtttactaatggctcattatacaaaaatgactggtaaggaagccagctaagctattaacttagactatgtgaccatgagttggcaacataagttaagtccaaagctagccatgtaaagaagattcacaagtttcatcaaaagaagatggttcacaaattacaatagtgcatacaattccacaaaattcggaaggcacatatgacacgtgaataattaatttcatgtttccatgctttggcaatgaaacccagaaggtgtatcttagatatgacgcattgttggttaattaggcaatatgatggttgacgtaggaattttcaagaaataaaaagatgagatgttttgttttctccctacgtaggtgacgagtcataaaaaaataatgtaatcattgtagtttccaacacttgaacaagtccaacctgcaaatttgaagagttgtaagctcctaatctccccatgacataccaagcctgaatcacctgcagaatataaatgatgttgatgtcaagacagggtgatttctttctgaataatgagaatccaaaggaacagaaatacaatgtcactttacaccgccaagcagatcaacatctcgatccgttggttctccaaagagttcaaaccaaatgaatgaatttagtgggttgaagctgcaaagatagaaagataagtggcattcagtcagtggaactaatatgcatacacagaggagtatgatatcaatttagctactgagttagtgtattaatagtccaaagtcgtatcatcgtatcaaactgagaaaaaaaaagaagagaaaatctagatgatgctcaactatgacattgaaggttttatcagtcattaaatcttaggtggaattgaaactcactctcgaaagctgactttgaatgcaacaatagaccctgtcttggatttgttgaattgtgccctgcctttcttgcgtaccctttcttggatctgccacccgtgcacacaagtaaatgtacaagtaagtattactagaagagaagtttgaagtggcgagaaagaaagctcaaataaattagggaaccaccctttgcttcatgagctctgggttcccgatgctatcaccgagaatggcgcggagttcgtcgtcgtccctgcaggcattctccagaaccctgcatttgcacagcaggcagcattagcaccagcccacaaatctactgtatctatctgtatggatgatggtgatgatgatgcagaagatggatttgagtgagcagggaagggaggcgaatccagatccaggagcagagtatgtagagggtaaaaggacagtgccttgcccagccgggataggtgttgtcgagctcgtgctgacggcggcggcgctcctcccgcaccttggcgaggcggcgctccctcgccgtggtgccggacgccgcggcggcattgtcggacctccctgtggccgtaaggcggtggaagcggaggcgaggaggtggcgggaaaggggtgaggaggaggaggcgtagggtttgaactggtggtggcatcatctcatcgccgagctgagcagcagcagctcactcttgctgctttgcttatcctcttcgcagccgtcgccgtcgggaagcacattggttggcccggccgtactgattgataaccaggtgggccgtcggagagcagcccgtctgtacaaaaactcaaggcccaataataataatccaagaagagcaatcccagcgagcggtggcaaactaggaataagttcaccggaggaacttaacagcgagattttttgaggtcccttaaccacaaaaccagaaatgtctacccctaaacttactcaaaccgttcaccggaggtccctcggcagtatttttgcccagttttgctgacgtggcatcctactcagcaaaaaaaaaataaaaggtacgtggggcccacatgtcagctgcacatattttttcttctcttttcttctccctttcttctcttttctcttctctcctctctcttctccttcaggctggcggcgggcgcagtcgcgatggccgagcgcggcagcagagcggtggcgggctgtgggcggagcggacggcgggcgagcccggcggcggagcggaggctacgggcggagcagccgcgcgccgtggccgccgtcgtcgtcgccatgggcgaggctacacggcgcggccgttcggcggcatcggccaggcgtcgcagtggccgtgcataggtggctcgaagtgccagctgacgccgcgacagtggtggcggcggcagcgtcgccggcctgatcccatggccctcccggacgcccagctcgcgcagctgcagcaggagcgtgtccacgctcggcgtgccatcggcgtcgtggacggtggtcggcgcgggcgcggtgaccctcgtcgtcttcgccgacgtcgcggtagcacttgacgtcgtagctcatacgcatatacaccgggtacagatggccgcatgtacatgcgtcttcgtacgagcatatatatgcatgcatggagacgaccagctatagcctagctagcttcttgttggtttgccgcccgataacatgcagacgtatatattaaccaagcatgtgtatatggctgagcacactcacatgtatatatgccattacgtgcagtggaggagcgcggatgcggggggtgcagcggaaggcgagcgcggcggaggagcggcggcgggcgagcgcagcggtgggcaaagcagcggagggcgagctagcgaagcggaagacagtggatgggacgaggagcttccccgtgctcggccgccaccaccgccgtgcccccgcgggtggccgacgatgctaggagaggcaccaccggcgggagaaggggaagaggcagaggaagcgattgtttcttggttgtcggctgcctccccctccctcctaaactcgctggccaccgcgctcgctcgccgccgctccaccgccgcgctcgcgctccgctactctgtccgcggcctgcttgcgctccactgctcggcccaccgccgcgctcgcgccttccgctgctctgttgccgcgctcgccctccgctgcgccgcctgcatccgtgctcgccactccgcctgctgcctccgctccgccgccgcgctccgctgcctccgctccgccaccggacggccgcgccgcatagcctcgcccacggcgacgacgacggtggagagccgacgacggcggcggccacggcgcgcggctgctccgcccgcagcctgaaggagaagagaagagagagaaaagaaaagagaagaggagagaaggagaagaaaagaggagaaaaaaagatgtgaagctgacatgtgggccccatgtgtttttaaattttttttgctgactaggatgccacgtcagtaaaaccgggcaaaaatactgccgagagacctccggtgaacagtttgaatgagtttaggggtacacatttctggttttgtggttaagggacctcaaaaaatctcgctgttaaattgagggacctccggtgaacttattccggcaaactaacagttccaatttagagggcagttgatatcacagcagcaaacttatcatggaatacaaacacaaagtttcagagtctaattatctgtatctcatatgcttacatattgctccagaccctcagataccttatattagcatggtatccctcaatacatgtcttaggaagacgcacaaaaattgcttcggacgaatgcagcatagccgtcacgtgtccaagacaacaggtagcatctcattctaagcactgggcattgacggtacacaagacaaatagatgatcaaacacagtacagtatcactcctattgtcctacaccacatgcaacaatataggtgcacgcggacctctgcatcatcctcttcgttcataaatgcaaaattgtactatcttccaactcgctccctgtaaaagaattcaacctcgactgacacaaatctcctggatttcattcagaccaattaaaaagaaggggaaatcaggttatcatctttgactaggctgagaagagcagaggcaaataatcctccaaagcctgcagaagatcagcagtccagcaagcactgaattcagttgtggtgtttttcttgtaacttttactccttcttaatatactcggatggtctccttcagccttcccggcgaaaaaaaaaacactgaattcagacagttagttcatcacctctgccattattcttcttgataatcaatttagcagatgtgccatgaatgaaccatgaagagtgatcgtgcgcctcctgggcctagtcaggagtagtgctcatgagtagcgagtagccatgaaaattatccaagtcctcgacgcagctcctctgagcctcaggaactcataatccaggcgcaaacatccacttctaccctcccatgtcttcttctgatcgcaccggcattgtttggtttggaattgaagcaccccatcacctgcaaatttgcagcttgatttgtctgtgaattcagaaaaagaaacatcaatttaaagcagaatagcattggacaaaaacctgaatgattggtgggctgaagaatcaatcagacatagaaaactgaactaatatgtatacaggcgtacatgcaatgcaagcattgataattaaggtgataaagaaagatagagttccttccaataaaactaaaagaaatggcaggcaggccattgaaatgtaagcactagcaatctgccctacctacatatcacaaacatcacgcctccactctgttccgggcaggatgaaagggaatagagatgggaatttaccaagccagagaacacaaggtgccacctcttgcagacagcagaaatcaatgatgcaaagggacatgtggaaggtacaagaaagaaactgcttgtgctaactaattgctatgatttagtaaattaagtgccagccaacagagggaaccaattaagtgactcacgagcatcatcgacatcaaaagaccaaagtgcaagactatttctatagcccactctcaattcacagtctctgaaaagttcatccctgaaatatgagcattcccctcctcgcattctagactgcaggatttgaagatttcattcttgcttggtgcatcactttgtatacgctctttgtgattaggcctctctcaatggcatgaacccagagcatattaagcgatcccttctcatcagcataagaggtacacatacagttgtaaatctggggtgttatgtacaactgcttcttcgccatctcattcaagatatccaaagcagcaactggcttcccagcagtcagatatgcacacgcaagtgtagcatacacaagacagtcagcttctagacctttgccttgcatttcattgaacacattcccagcaagatcaataaaccctttcttgcatagccttcggatcagagacctatatactgctttatctggtggaaatcctcttttcataagttcatcaggaatggctagaactgcaactgcattattcttgttgcataaaccatcgacaatccatgacaacacactataattgggtgaaaatcctgcgtacaaggggaaaaaacacaagatataccaaacatcattagaaaatactgatatggattgataactgataaaacagagtcaaagatgctgcatgcttttctattataacaaaaaggatctctcaatatgcattattaagtcttgatgatgtactatcgctaccaatcagagccataaattttagttagatttgtagtacctgcacccatcatctcaaacaaggcttccttggcttcatccagctccttggccttacagaaaccatggacgagagccttgtaagtgaactgatccaactgtagccctgactccatcatccttcttttcaccttgagcgctgaggtcatgtcccctctcttgcagtatgcgttgatcagcgtgttgcacgttacatgatcagcctgcaccttcctctcatccatctcattaagtaacacattgacctccttcatcttgccatcttcacagagcttcctgagaatcgcattgtatgtcgcgacacctggtagcatccccattgcctccatctcccctcgcagcttgaccgcctcctccaagtcgcctgctcgacagtacccatcaacaagcgtggtgtatgtgacatggtccggtgccacccctgccatcgccatctctctcagcagctgactcgcctccttcaccctgcgctccttacacaagccatggatcaatgagttccatgtgacgacgtcagccttgacaccctgattctccatccgctcccgtacgcacatggcctcgtactgcatgcccttcctgcagtagagcgcgatgacggtgttgaaggagaacctatcgagcggcacaccggcggcgtccatccgcgtcatcagagactcagcgagcgcggcgtccccggccttcaagcagacgtgcagcatggcgttgtacacgtgggtgttcatggcaaccccggcccgcgtcatttggtcgaacaccttgcgcgcggtggccgtcatccgggacttcgcgagcgcggtgaggagcgcggaggaggcatgcgcgtcggggacgacctcgcgcgcgcgcatgtggtcgaagacgcggagggcgtcgtgcgggcgggcggactgggagaggaggaggaggagccagctggggaggtgggggtcggcgaggagggaagggaggaggagcggggaggagagcgggtggcggagggagaggtcgcggaggagggagcgggcggtggggtggtggcgcgggtggggggcgaggaggcggaggagggcgagggaggcgtcgagcgggtggggcggaggcagggagcggaagaaggcgagcgcggtggaggggagcggggagaggcggtggaggacggcggcgaggagggagggcgaggccgcgagcaggtggtggtggttgtggggttgggttagcgtggatttgatgacggcggcgcagacggcctccacgccggcgggaggcggcgccatcagcgggaatcacctcttactcaaggtgctactactagtagcagccgatgacgacgagtgtatctgccttgccgtctgatccacagactgaacggtccagattgcaagggaaattttatttcaaagttgttgttgaattttttttcccaagtcgttaaagattacaataatctggattacagtaatgttaaattgaaacaaacaaggccttagtctatgctcggaagctttgctttttgccgtacacaaaatgaaaaaaaaaacatgattagtgtactagctataaacttgaaaaataagtttattttaaatttttttaatataaaaatatttacagaatatttaatagtttggtaagcgaatttatgataaacgagaaagttgtaaaagctaagtgaggttccgtatgcatcccgcattgttaaacaagttttggatagcattctgaacccaaccgtccgggcggaagaatatgcaaaatccctcgacattacaatactgtaggagtagctaattaatactcctctaaacacaagtatgctgctggtttttttagccttccaaaaaccaatgctttcctccaattccctgagtgttagaaacatgttccgaccaatttgttgtactagcttgatgtgatgagcagcagccccagcgcatcgatcagcaggtaaacaacacatttcagacaaaacacgaactaattaacttctttgcaccgatgcaaagctcacagtaggactcttgcaacactagtatatgcttatagctatatagaccagtaatataataagggtaaatgtgcataccttaataactggtttctcagtcatcaccaatgtcacccacccagctttgggtagatacctgttaacattacagaagaacagtatattaatcagcccatcaccaaaacacaaattcacaagtactactccagtagacaattaagccaaggtgaaagtatttttaccctatggcccgtcccatgatgtgatgttgctgaagccaaagctgcccatgtgtgtaaagaattcggtcgtccataggattgttgtcacctgataatgagacagttcatcgatcagtataacgcagcgctattcacagtacaaattaattcatgctcatcacttgagccaacagatatatatgattcagattacttaattaatatgcaaggaacaaaattaggaggtcaaaaccactgatagaaaatagtaataagtgtaagtataccttttgtgaggaaatcaacttgtgcattatcccgtcgttcgtgaacctacaaggagatataatataattaacaaggaaaattttcagacataatacctgagatcaaatgtaaggggagactgattggtgtggatattacaaagcttaacgacctcaataacgcgatggacgattggaatttcacggccctacaaatcaaagaggcaaatcgcaataagttaattagtgccttgcaaatgatgcacgtgtattagcatcattaaaacaaggttggagaaagggctgctttgttgatgattcagaaaatatttttatggtgatcgataaaccagtgacaattcagtagggacttacatcattgaaaacaactatatctcctgttcgtatagggtgtttgctcatttgcaaaaacaggatatccccctgccaggcaagcaaacacactaacattgatcaggtgaatcacaagctaggacatatagatgacaacagtttgaagaaaatggtagagtgattagtagtgaattcatgccatgggatggaggaaggaaaataaacagaccctttcaaatccaagctccatgctttcagatagaaccacaactagtggcgactcactccctgtcatgataatcaatcccttccatatcatcaatgccgagctgataaccatccctgtcagtgccaaacaacaaacagattaactaaacggggagggagaacgagcagcatatacaaacacactaattctaatcaaaattcactgtctttatccattgaattcacgcctgtttggagtcagtcagtcaggcatatgaagggacaaggtctacaggcactagcaatttaatcgaagcgcaaaaaggcgtaatattatgcaaaaaagaaaagaaaaaaaggatcgattgttacccagggtaatgaggtggacgagggcgtggcgaatctgcatcgcgcggatcggctcgatcgacgatcatattactccatcgctacagtatatatctgctagctaagctactactgcctctgctcgatcgggaggagaagcagctactacaagaggtggaagagaagtgacgcggagagagaagtcaagcgagggagggacggacgcagagagagagagagagagaagaaagaaaagtcagacgtggcggctccttcactttcagtatgggccgctggcccatcacatcaatgcaagtccggcctgcccgaataaaagttcactttgtctcccttaactagtggccgaatctgattcatatccctcaaccacaacaccggatatctggacctgtgttcgagtggagtatttgttttttccatgatataataataagtatgacatttctagactagtaattctaataactacgagattcggccagagcagctacacaagatacacattatttgagatttcttttataaaaattttaattttttttcctagctagctagctagtactccctccaggtttttttatatgatgttggctagttcaaatttatactagtcaatgtcatacatatatgtatggaggtagtagtaactagcttctctttcatttttcttgcaacatgtggtgcggtgtgacacccatgcatacatacatggcacaatatgaatgaatatacataatagattttatttgattgattcttcctcctctgcatctgcatgatgccttggaccttaataatttctcccttgtcgactcgatccttaattggtgtcagtgagtgggggaggaaggcgatactcgtcgggtttgagagccacggcgaagtccggcagcggcggcgcgctgtcagcatggtcatggatgatgatgttgtccttgttgtagaggtccttgttgatccgaactttgcacgacgactccttgtgtatcttctcctgaagatacctcatcgatccccacagcggcgggcttctgcattattattcacatgcatgcaggtaccaaaattcagaaatcttagagattcttaagctagctcactgcagataacactacatctgaaaagaatggaatgcacgccttgaaacaggagatgccgcatggaaggcttcacatgcagctttgctctctttgagcaactcctccgctgattgcagcgctgccaccgccgtcctatgagatttctcactgtttccttcatcaaggattagtccatggtagtagtatgccgcagcctgtttgtagcaggaggatccacatatgtttctcttcagttatagatagattttatcatagtgtaaatggagtatgaaattaacacactcacaacaaaaccgtcctttttgcaacatgactaaattatctttacacaactacactatgtgttaatgtacttcttgttaatttgtataggacagccattaatttgtttgtgcttacagcatcattcgttgtagtattaatgtttcagaatatgaaagaagttttacatacttttgcttcgatgtgtttccatgtaacaaagagcctgtgcttttctgcccagccatcaagcagaggtaggtccgaaatgctttcatgtgcctgaaaatgaaatagtacacaagaaagattgaacagatcaaatgaaagagattatacagaaaagaatattgattctctatttatcaaactaaactgcaggagcatttatcgtttgatttgtgactcctcataggctgctaggagtagtttctgaactcaaacatttgcttactgactgcaaagctacgttcagacaatgttcagagttcagttgaggaacaggtaaaacccagactaagatctcagcagaggttgaacatcattagtagcaataatccctatagcctcagtgcctcacagtgaggccataatgatgaatatccaggagtatcaattcaagattaaccaaagatgaggcaaataacaattgaagctgcttccaagtgttacacgtgcctttgtcagttactacttagtcaataacagcattacttaagaacagactacttcagatatagcactgatatggaaaacaagtactacctgctgccagcacttgaccatctcacatgccagcctcctcttcactgccaaggtagcctttggactgtcaattgccaatccaagctgaacatcaattgcctgacagtacaccaagccgcgtgacatggacattttgtcaggatgatgttcttcagacataagtaaaagccacaaaactatagcatgtacgcaaagccatggcatttgacttatactagtaaaattatgacgattggtcttagaaatggacatttcaactgctatttacatgagtcatgtgatttctagctatttgatttgaaagaaagattcacccaaaaaaataaaataaaaggaagcagatggagaaacgctttacttgacccagggcttgcatgcagatagctttcaggattccttcagctaagtccacaggaagacctttcctacacgaaatggcagtcagcaacaataactcctgtccgacctgcactaactacagaacgcaacattgttcatcaaacacaccaccttttctccggcgatatcttaggtagaacatgctggattgcacactccaagtatccggctgccttgagaaatatctccactgaagctcgtttgttttctgaaaagtaaaaaagggaaacacagaacagtcaaaatgctgcaacggacaacagctgagaagtaaggaacatcatcgaaaattcagaagtaacaagtactacttcaaaattcagaagtaacaagtactaattctgcatcagcgaggaatcaatggtgatcatggtacagaccttcagataccttagcatggtatccctcaatggatgtctttggaacaagaagggaatttgcttgggacaaacgcagcagagccatcaagtgtagaactgatagcacctcataccaagcactgggcattgacgtatcctacacaacacaaataagtagacgattaatcacagtcgtatcactcttacttgccacagaaaatcaaacagtacgcataacagcatgtagacctctgcgtcatcctcttggttcatccatgcaaactgtaccttatcttccaactcgctccctgcaaaagaattgaagaaccaggagtactgacagttaaatttcctggatttcatcaaagagcaaagagaaggaagaaaagcatacatgaggagttttaccatcttttactaggccaagaagagtgggcaagtaatcctccaaagcttgcagaagatcagctgacttagacccccctgcaagcaccaaattcagacagttagttcatcacctctgacattattcttcttgtcatcagatgatgagccataaaaggatgaaccatgctgagtgatggtgatcctccaggtgggcttggtcatgtacagtgcctcatgagcagccatgacaattatccgattcctcaacgcggccaggcgttcggtgagcctccttgggaggccatcacctagcggctgaaggggcagctcatccgagctctcgggtactctcaatccaggcacgaacacagccacctcgcctatgctcccgggtcttcttctgatcgcaccggtgtcgtttggcttggaattgaagcatcccatctcctgcaagtttgcagcttgatctgtccgtgaattcagttagaatgaacacaacctatagctgaactacatgcaaggacatgaataataatcagaagtggtaacaaactgaagaaaggtaagacgtgtacaaacaaacaaacaaacatacatacaagcatttataataaggtagcaaaagaaaggtagtgttgctttcaataaaaactaaaaaaatggcaggcagcgattgattgaattgtaagcactagcaagcaataacaatctggcaagaattgagaagctagctagttctaggatgcaaacgaatgcataggttaatcagttacaaatgataatctcaaagacaaaagaccaatttaaagatggaaattaccaagtcagagaacacaaggaggaaggtgccacgtcttgcagagagcagatcgatgaatggtgcaaagcgaaatgggggggaggtagaagaaagaaagaaactgaatatgctagctaattaaactgtggtgatttagtgaattattaagtgccaaccaagagagggaagcaattaagtgagtcacgagcatcacatcgacatcaaacaaccaaagtactggctgcaagctcacatgccctaccacgacacgtcaacgatcgatcttgcaactagaattcgcactttttctccccttgcatgaatcattcatgaaaattttattattttttctcacacttttccatttctcagtaataataacaataaaaagaaactgttagcacctgattgcaaagtcaaccttcagttagaacggacagtttgactgtatccagaaccaatcagcttctattattggtcacaaagaaatcgatttttgcgtctgccctcggagatattcaggaatatttgaaggaaccgcataaaaactgggcaggagacgattcggagtaattaaagaatcagtgaagaaaaccgatcgagtgggattggacgagcgaaattaaagaagagaagggaatcaagcacgacaagttcaaatccattggccgctagatatggagttggaggagtcgcttaccggccttatgggggcgaaacccaggtgaagaagaaggcgaaatggcgccgaaacgtgaaagggctttcccggttttaaagaagagagcaaggggagggaaagcagatgaggctgacctgtgggtcccactcttcacaccattttcgttttacaaataagaatttacgcccactcctaccgggtcaatgtaattttgcaaaaattaaaggcttgttccttccttgcaaaacacaatactacgtgctgtactcttcagtgaaactgaaaacaggtttggggtcgggtgcgcacacgtctgggcctttcgtgctcctcgccgtcggctgattttgctgattggtggcttgcagcccggaaatctgttgctaaggttgaccgcaaaacgttcgatgcgggggtgatccttgtaacctggttgatttggaaagagcgaaacgcaagggtgttcgaagggatcgaggcaacgattctccatctttgttccgccatgggggatgaatgggagacttggatagctgcaggtcttgttagccccatgtgtcactctgtagcaactcattctgtgagattttagctttctttttatgtctgtaatggtggtgcattgactcatcgcgctaccttgtacatttcttttcttactcttaatatacattggccggctattctctggcccggcgaaaaaagaaaactcaagtgagaatcatggctttctggagaaggcaaacacacacctcggattgtagtttgtagcatagcataataacctctgcccactggattttggagtagcaacggttgctgtaagtcaccagtgcaacaatgataatgtgcaggagtatttaattctcacactacaatacagctagtgtcattctgataaggtttagttcatccctaatctggataagatctggtaatccagccgtttggagacgcttcaagtcatgctatgatagaccaagaattttccttttgagtggatgtcagtacacttcacagatatttaagaatctcagctcctttccttaattgtgaaaccatcggttgcaagaggagaagcttgacagaagctaaccaacttgtaacttgagattagaggaactaagattggcaatcatcatccaatcaagtagtaaaggatagcaaggcaaaatgtactagtacgtcatatcaatttactgattagtttgttactcgtccaattaatcaggcttcaacacgtgtcagattgctccaattcagtcctatctgaaaggttggaggaggttgttggagactctgagaaagaaatgtatgttgaggccgactgaatactgtttttatgtgaccatgtatgtagtcatgacccattctgcaatttcttagtactccctccgttttaaaatatttggcaccgttgactttttagcacgtgtttaaccattcgtcttattcaaaaaatttaagtaattatttattcttttcatatcatttgattcattgttaaatatactttcatgtacacatatagttttacatatttcacaattttttttaaataagatgaatggtcaaacacgtgctaaaaattcaacggtgtcaaacattttgaaacggagggagtacttggtagtagtagtacagtccaattccaaatatattctgttgtgcatgtttgaattggatagagttaaatatggatatgctgatgcttacagatgaaaacgaatacgttaacaaggacgttgatgtactgttttttttttcaaagaagcaatactctacttacctctgagccataagaatatgtagaggattgatatatgatgagaagacgagatgataaggaaaaaaacaaatactgtactgtatactcctatgtagctacgcctcaaattaagttcctgtgaggcaggcaaatcccatgttgcgatgatgaactagaaataaggagcaaacaaagaaatgaagacgtcagcgtggattatgtaatgtactgaagaatgaagatgaaaatcacaagcaaacaagaaaaggtactattacggcccagaggaaagggatgatgcggcccacagcccaatagatgaggaaataaaagatctgctcctaccagatttggtgtgaaccacacacactaatccggtccaccggaatcgaaaccaaactgttgatcatcgtgcacaagcacaacttgccaaccgccacttcacgcgatcgatcactctcactcctctcgctgccgctgccgcacctagccaaattatgccttcgccttcgcacctcgccggcgcgctggacgcggcgcgccccttcctgcgcggcgaggaggagcaggtggacccggcgctccccaagctggccgccgtgctgcgcgccgccggcgccggcgagtgctggcacaagcacggcaccttcctcgcccacctcctcgacgtccaccgcatcctccgcctctggggcgcccccgacgccgtcgcgcgctgcggcctctaccactccgcctactccaactcctacgtcaacctcgccatcttcgaacccgacgtcggccgcgaccacgtgcgccccatcgtcggcgccgccgccgagcgcctcgtccacctcttctgcgtcgtcccgcgccaccagctcatccacgacgacctgctcttccactacgccgaccaggacctcgtcgccgacctcgccgcctccgaggcgtcactgcaggacgcgcggcgcgggctgttccaccacgacggcgaggcctggcggctcaagatccagcgcctcctcccgccccacggaatcactgtcaaacacatcaggtgagttagttaattagttacaataaataaatcttcttaatttctactgctcagcaccagatggggttacgagaattaatttttctccgaccctagatgatgagttcattatgggaaccgttcgattcagaacgtgtggtgaagaatcaatcggacagagtccatcacagcatatatcttggttcagaaaatctattccacgacatcccgtggagacgggatagtaatccggatcgatcccctcctcctacctcactcttctcccccaaatcgtcggagccagcggccactgtcgtccccgtcgctgtcgccccaccgctcgtcggagccggtggccgccgtcgtccccgtcgccgtcgccccaccgctcgtcggagccggcggccaccgccgcgggggaggcggcgacgacgaggagcttggcgacgggtgaggtgaacaagagggagagcgggagcgggggcgcggaggccgctgccggcgccggggaagccgctgctggctcaggaccccggccgccgaggaggacgacgacggcgcggcctcggcaagggtcgccctcaagctcgcctcccttgccgcgccgctctggctccccgctctcgtcggtcttctcatcggctgccccgcctcgccgaccaccggattcgccgctgcctcctccacgcttcgcctcgccgaccaccggattcgcgcgccacctccttctcctgctccaccacgcggctacctcctcctctctctcctcctccaggccaccaggtactagatatcacgggtacccggtaccagatactaggtactagcctggtaccaggtaccaaaggtatcagtcggtaccaaaggtacctggtaccgactgataccaaggtaccaggtatcaggatggagaggaggtagaggttccagagcatgttgccgccggcgttgcagtgaccgagacaccgagatcgccagattcttctgcttctgtagcggcggaggaggagccacctacgctcaccggcaaggaggcggcgggagcagcgggcaaggacgacggcgaccttggcaaggagcgcgagggaggaggggagaggccccggcgccggcagcgacgagagcgccagtggaagaagcagtgccacagcgcgcggaggcggcgccgcagcgggcggaggacgacgtcgtggaggtgcggcgagatcaccctcgatgccgccccgacctcgccgacgccgtgccgtcgtcatccacggccgccggagacgacgacgaccccttcctcctggccaacttcatctccgcctctcgttttcttctcctgtgtgagagagtttgtggagggaaagggaaggagacaaggtagtggagatcttatcccgtggctgctacgttgcaacggaatctcgtacggtagctgccctcttccaaaaataagcattttctacgtaatttagtaaggatttggtcaaaatttgaatttaaattgcctagatgcatttccgaagattcggattggttgaaaatgtgtggattttcgtgtattaaaattggtgtacacatacatagcaagacggttaccatggcatcaaccgaaaaccgtgtgaatttcatcttcgacgtttagaatttagaatttagaagtttttaaatctcacgacaacagctcgagtgaaaatcataggcatgtcggatgtcatcatcttctacgctgttgcttggagagcatccgctgtaaacaattttcatacagtgatactagtgccagatccggttcctgagtatcagacccgttatctatatatatctgacctggtactcgtatgtgccatacctagtatcgggtatcaggtatgataatttgatacctgagtatcacgtatgatacatacatgtatcttatatggtacatggtacttgcgagccatatataaatcaggcatcgtgggagcccaacgtgcactagtcaatctcagtaccagacataatagtgtatcatcaaagattatcaagacaaaaaaaatctttttatttttcacaagcctcgctccatggctcgggaggcatattgccctgccaagacatctggccatgcctgcccaaactcaattaatatatcacaactcaaagtgcccaactaagcagctctctcgagacctagtcgttgagacccatgcatgtagaccggtcaagctggggcacttgcactagtgggaacacggaatagcgcatgtttgatgtggagcggcatgtgcgactttggtttcagacatggtagttgggagcgacgaagcgctagatgcggagcaggtgacgtcagcacttatcccgttgaaacggaatcccgttgtctagccgttctcatcttggttaccaggaaaaaaacacttaacaattcatgacaaaattaatcttctcatacatgttttatacgatcagaggatttggcagaaagatgtcttgacaattttacagactgttgtttattatacctgacaatacaaaagaacataagctcatgttggcagctagtgccaataaaatttggggagatatccagtaaacatgggagtatctagtttgtttactgctgcgataataacgtaacttacaatttagatcatatcatccacaagtaactgtaatctacagtgcatgagtacaatgcaaaggcaaaccaaccccatgcatagatagcaaacaaacttagttgcatttcgaagttggttctacatacttcgatcagattgcacctgatttttgtctgtactttgaattggaaggactggcgaggatgtggcactgtcgaggcgcatcgcggcaaccttccttctcatgacaatggcggacttcagcgaccagctcttcgactggcaggatcgcctcttcgacaacaccaatggccgcctcgagttcagtggcaatacctggacttcgctctggccaggcaccggcaagcccggcctctggactgcctccatatcccgcatgggcgcgctctacagcctcatcgttcgcgaggaagagatacacatagctcaacgaaagcatagcaacaatggccaagaagacgatcgtgacgaggacattgagctggtgatcccaccggtgttcaatggctgcacccaggtgctcaccgccgacgaccagaaggcggcacgggacctctactgggatgcagtttgcagcggcggcgaggacgagacggattggcgcaaggtggaggagatcctgcgacggtgcattggcaggaacccgtttgtaggagagcctcacctggttcttgctcaggtgcttctgaacatggagatgtatgaggaggcagaggagcagatagaggcaggggtgaagctgttgctggagtgggggagcagctgggacaagaggatgccatgggaggcttgggtgtcatggggcagggcgatgctgatcaaggccaaggacaaggattggccgcacacctccttcggcatcctcagcatagggcttgtcaagtgagtgaacccattcacctccactctctgatggtaaattaagctgcacctgtactgtacatgtcataacatcacctgataattgctgtatcctctccatcggtatatatatgcttagctcgatggaggaaatcaaacatgatggatatgaaataaatcgctccacaaatatcaaaataatttgacgcatccatagatatcatttcgtgccaatgccaactgggttgagttgagaattgtgctatctactactttaggtcgtttgatcatataagtccttttgacttttttatgaggtaatttttttagatttgactaaatttataaaagaaaattaacaatatttcaaaacaaaaaattgtcacagcagtcagccaaatgaatgaagcaacagggatgggcataggttcaaacgcttaaaaaagtgaaaaatacccaaagaattgtttcatagtgaagccccatttggattggaggtttttgtacagcgactattccgtattggaagatttgactgtacccagaatagggcttttctcatgacagtttaattataattatttggttcctatttattcacgaagaggcacagaatggatcacatggttacatcatgtgtccatatataaaagtacgttaacaacagttaaaatcatgtttgttaacacttgacagttggtatgaattttgtattagagtcatcactaaattaatttgtattgggcaaatccaatgacttacttttttagcatagtttctttattaaaagaaatacaaattccgaatagagtttcgtgacccaacacagcaacttcgtagtgatttcatagagataagcagagaatagagcgggggttaccgtggaggcagcatcagcaagggatgcaagaggagcgggacctctatgaaagtagtaaaaccagtgaaggtaggcattgtactgctgcaaggcacatagactagtgtttttcaagtcacaagaaagtagtctgtctgttcccagtgatttgaattcatctgatttcaccattaggaagccacatgggaaaaaaaacagttaacgtaattaaattaaacaaaccaaaaggcctgggagttaccagggtaaactaaaagatctagcagtggcggcggtggggaagaagaagctctggcttgggcaacttgtcctggaccgcctgaggcgccttggaatcggatatcgcacttgtccgacattgacgcgcgcagatgcgaccttgcgagaagcgacaggggaatgaacgagcacggtcaagtttagtgatattccccatggacgccgagcgtccccttcctccgattcgcagtcgcacatgatgaggatgaaagagaatcggaaaagctagttggcgcgcgcgccggcggggcgcgttttaggcccagaaggcccagtgccggcgcgcgcccttctgcacgctttttttttctttttttttcgtttttttcctttttttttcctcacttttttttctgattttttttaattttttagcatgttttgagtttgaaagtttttaaattttgagttgaagattttcaaatctggatttgaaagttttcgaatctcgatttaaaattttcaaatcttgatttgaaagttttcaaatctcaaattgaaagtttttaatttttttcaaatctggacttgaaagtttttgaatctctattctcgagttgaaagtttttcaaatctgagttgaaagttttcaaatctcgagttgaaagttttcaaatctcaaattgaaagtttttaatttttttcaaatctggacttgaaagtttttgaatcttgattctcgagttgaaagttttcaaatcggagttgaaagtttttaaatctaaagttgaaagttttcaaatcttagttgaaagtttttaaaatttaactttaaaatttaaaacttaaatcaaaagttttcaaatctaacttcaaaaaatttcaatctgttagtaaaaagatatcccaaaaaaatttccaaatattttcttaattactatcattagtgttaagtatattaactaatatacgtaattaagactaaagggataaagtgctcggcaggttcttttcccggcgcgcgcgcgcaagccatccccgaagagaatgaaggggatggagtggagagaaagagggggagagggagcggatgaaggagaggaccgccacgacggcgcgatcgcttcaccgccatggctaccgatcgcgactgcgtttcgttttgggagaattggccccaggcctaccacgccacagcccagtaaggagacgcggggcccattatggcccacctaaacagtactccgtattatttactagagtaaattgcacccacagtcctagtaaaaaaaccggaccggcccggcggttgaaccgggaaaaaccggaaccagcccctcagtcggttcggtttgctgcaagaaccggatatgcaatcgaaccggtcacaaccggatgaaccgggcggtttttggtgaaaaccggcgaaccggacgcttctgaaccagcggttctgacgagcacgtggaccaggctacaaaggcccactaggcccaagtcataaatgaaaaaaaaggagtcataaatgaaaaaagggtgggaagatgagactcgaaccctggttgtctcgttacaggttcgacgactaagccaacaagaccacctacagatgttgctttaaggagaatacacatgtaatatgaagtcttctgttctgcagtcgaaccggacgacccagcggtcagaccggtgaaccagaagtttgaccggttcgatggccggtccggttttttgcactatgcccacagttcatcaacttggaaagtgggtgcaatttgatgcaagaacttgagaaatgagcgttctagtgcaataacttggcagataagtgcaatttaatacaagaacttcataagtgatcgcataaatgtaacaacttgtaagatatgtatgattatgatacaataagttaagaagttattcaacaacttaattatttggagcacatttttacacatatttgatttttaagtgcttattttgataatatactagcgtgggtttgtatataagcatatttatatttttatcctaataactaataattgaaattcaattaaactggatgtggaaattattgtatttcggttgagatttgggaaggtgaagaaaacaaaaattcttgaaggtaattggatgtgcagtataattcttaaagattaaattcaatattataaggtaatatccgtaggattgctatgtaatggcatatcgacatcgcgaaaaaaaaactcacctagcatatgcttagctaagttgatgcatcaaaatactaaattgttaagttcttatactagaacgtacccacttgtcaagttgttgcactcgaatgttcaattctcaagttcctgtactatatcgctcccacccgtcaagttgttgtaccgtgggtacaatttacgctatttactattatgttctatactatactatagtaattccagcgcagcgcacatgcagactgtttgctgcttttgcaacatttgacattgcaatgctctctaaaccctctactctaattgcctgtccttgatgatcaactcacaattattttttgcgagcggggaacgataataatagttactgccttcgtttcaaataataataagatgttttgaattcgaactaaaacttttcaatttttgaattaaaagtttttaaaattttcagaattgaattgaaagtttttgaaaatttgtgtggttactttttagaatcgattttttccatttgtttgtatgtttgatatttcttgtatctttttcatatggtttgttttgttccacctaagtagagaaaagaaaaatatgtttttgcataagaataccggatagtgtccgaccgttatccgattccgacggatatcaccaatatcatattcgttttcattccgaaaaataataatatccgaactcatttccgaattcgaaaatttccgaatatatccgaccgaaactatccgaatccgaaaaaagtctggttggatggaaactattcgaatcactttcaaccctacgccactacgccagacacctgctagctaactgcagttcattatccggtctgaccgtccacacaacaacagtcaaaccgtccttcgcgggaaagattcgatattttccaaatttagttcaaacttactataatttgattctagtgttaaatttagatattaacaccattctggctgatatcatcatgcatataacccaatatgctcaccaggcaagctgaagcggtgcatctttggcagtagtactttatatctctgaactactctattgactgaggctctgtttagttcgcataatgaaaatttttaagtgttacatcgaacatttgaccgaatgtcggaatgggtttttggacacgaataaaaaaactaatttcataactcgccaggaaaccgcgagatgaatcttttgagcctaattaaaccgtcattaacacatgtggattactgtagcacttatggctaatcatggattaattaggctcaaaagtttcgtctcgcgatttctcccataactgtgtaattagtttttttatctatatttaatgcttcatgcatgtatccaaagattcaatgtttttaggaaaaaaaatttgagaactaaacaggaagcggttctatcatttagaaactaatctctgaaccaacggtcgcatccccctaagcactacatcatgtcgatggttccaaagaccccagaaaacttgaaagtgcttgttgggatgccacgggaagggatcaaacccgataagctagttcaaattaaaacaagttcgtgcagatcaagaactagttagttggttaggcaaatattatgcatcagttgtatttggcatcatgcatatggacagaatctgaagcttgataacgatgttagcctttagccgatcgatcaactgatcttacaagagaaaagcacaaaacgatctagatatatgggtgcacagctagcagctatagcgtcacccaacaaccatgcatgactgtgcaactgcccgtctttgattttgcatgatcgatacatcgttgtcgcatatattttctttgtcgcctccttctccaagcttagctaggcatctcttgtctctagtgtacataagcggtaacccctctatgatgtgttttattcgataggtattattgaatctttgatccgtgaaacaagagtccaactccaacacgccagctagcagtaggtgtaagccgtgtttgcaaaactgcggtaaccgcgcggtcactgtgcttaccacggaacacggtaaaagaaaaaccacggtaaccaccttaaattcaaataaatttaaaaaatattttaaaattttaataaattttacatggtttcgtatggttcgccacggttaccacgtggcaaccgtgcttaccgccgaggtgtggtaaccctggtcccggcggtttgagaaaccctgggtgtaagattggccccattaagctagagatgaaaaaaagctcttggctcgtggcttggatcaaactcgcctggaactcgcatactttcagctcattggtataaaatttcttaaaaccttaatgcgtaggagtacaaaatgttgaggttgcacctctaatagggaagtctattcgtccctctagaaatgaaacggaccctcagttcttctatatctaaaaaatgactctgaacataacatgtaattatatcatagtcaaatttattatttttattttttaaaattgtataggtcaaattttaacttatgtttgtgtaatgatatatcacatattgatgtatattactcccacctttttaaatatttgacactgtcgactttttagcacatatttgaccgttcaacttattaaaagtaacttttgtgaaatatgtaaaactatatgcatacatataagtatatttaacaatgaatcaaatgataggaaaaataatgaataattaaataagacgaacggtcaaacatatttaaaaaagtcaacgacgtcaaatatttaaaaacggagggagtatatttttttaaaaaaaatatgaacattttaggcaacatgcataaaataagtggaaatcaccttgagggacaaaaattaattatagcaaaatatgttttccttcttactaatctgtcccaaaaaaccaaactctggctatgaacctggacacgcatatgtccaggttcgtagctaggattggatttttttttgggacggagggtacatctgcatgtaaaattcccttgcatatttgcagtgatatacaacaataacatttgtatattttgagtctattgtagaagttttcagagagaattaagttagccctaatacttaatagatgagtagataatgaaccgagcaacagagcgagctaggttataaattgaagtggttaagccagtactccagtttaatatgcgcggacgcagaagttcagaagaagaagaagaagcagagtggcacggttgagaaagaacaatagagcagagagcatggagaagaagaaggtggatgcggtggtggccgccgcccggccgttcctccgcggcgacctctctcaggtggaccccgagctgccctccctggtgtccgtgctctgcgatgccggcgccggcgagtgctaccacaagcacggcaccttcctcgcccacctcatcgacgtctaccgcatcctccgcctctggggcgcccccgacgccgtggcgcgctgcggcctctaccactccgcctactccaactcctacgtcaacctcgccatcttccagcccgacgtcgcccgggaccacgtccggggcatcatcggcgccgccgccgagcgcctcgtccacctcttctgcgtcgtgccgcgccaccagctaatgcacgacgacctccacctccgctacaccgacgcagagctgacggcgcacctggccgcgtcgcaggcgtccctggacgccgccaggaagagcggcggcggcggcggcgaccccggcgaggcgtggcgcgcgaagctggcgtcggtggtgcccccggagggcgtggtggcgaggcacatccggacgggggaggcggtggcgctgtcgcggagggtgttgggcgtcttcatcgtgatgaccatcgcggacttcagcgaccagtacacggactaccaggacaagctgttcgacaacgaggacgggcggctggagtaccgcggcgacaactggcgcgcggtgtggccgggcagcggcaagcccgggctgtggatgagcgccatgtccaggctggcggcggtgtaccgcctcatcgccacggacgaggagatccgcgagctgacagctggagagaggagcgtcgtgaagagggaggacgcggagctggagctggtgatcccgccggtgttcgagcggtgcagcaaggtgctggacgcggcggagcagaaggaaggccgggatctgtactgggaggcggtgtgcggggagtgggaggaggggaagacggagaggctgctgcggcggagcatcgagaagaacccgttcgtgggggagccgtggctggtgctggcacaggcgctgctcaactccgggcacgacgaggaggcggaggcggcggcggaggagggggtgaggctggtggtggagtgggggagcagctgggacaagcggatgtcgtgggaggggtgggtgtcgtggggaagagtcctccgcgacggagctcatcgccggcaatggccgcgcaccgcatggggcatcatcaacctcggcctcgtcaaataatcaattaaattaattaatggaattaatctctctctggaattggattgtactgtatggtattggtatgtactctaatgaagtatggaataaatgttaaatgggccggaaagaaacaagtcttgttgggctgtgacgtggtgggcggcaccgcctattgggccacccaggaaggagctcctctcgccattgatccgtcccctcccaaaaccaaaacgaaacgcactcgtgaatgccatgccatggtggtgaagcgatcgcggcgtcgtctcctacctccgctccctctccacttcatccgcttcattctctcccatccccatcctcatcatgcgcgactgcgaatcggagggaggggacgctcggcgtccatggggaatatcactaaacttgagcgtgctcgttcccatgtcaccccgcgccgcacttctcgcaaggtcgaatctgcgtcaatgtcagacaagtgcgagatccaattccaaggcgcatcaggcggtccagaacaagtcgcccaagcctccaattttgacagagcttcttcttccccaccgccgccaccgctggatcttttaaattgccctggtaactaatgattccttatttcagcatccttttcctttgtttaactcccagcccttttgtttttttttaaaaaaaaaattccctctaccgttcatcacgttgactgttttcttttgccccttcaaatgtcgtctcgtggcttcgaaatcagatgaattcaaatcactgggaacggacagactacttccttgtgacttaaaaaactctagtccgtgtgctttgcagcagtacgatgcctacattcactggttttactactttcatagaggtcctgctcctcttgcatcccttgctgatgctgcctccacggtaacccccgctctattctctgcttatctctatgaaatcactacgaagttgctgtgttgggtcacgaaactctattcggaatttgtatttcttttaataaagaaactatgctaaaaaaagtaagtcattggatttgcccaatacaaattaatttagtgatgactctaatacaaaattcataccaactgtcaagtgttaacaaacatgattttaactgttgttaacgtacttttatgggcacatgatgtaaccgtgtgatccattttgtgcctcttcgtgaataaataggaaccaaataattataattagactgtcatgagaaaagccctaatctgggtacagtcaaatcttccaatacggaatactcactgtacaaaaacctccaatccaaatggggcttcactatgaaacaattctttgggtattttcacttttttaagcgtttgaacctatgcccagccctgttgcttcattcatttggctgactgctgtgacactaactgcagcctccgtgggaggcggtttttgtaattgctccgtagctccttcctttatattcacagcagaattcacttaaattacaccatttatctttgaagtatttattgggaatgacatgcataagtaatgatatggtttctttctttgaaagtgtttggagaaggagaacagcatgacgctcttatggagaactgtaaaagcctttagttatattcaaggctccatagtgggtgagtgcattgttgaatggatgcgtaccgtgattaaagaaaaaggtgaaatagaacatccatttggcatcgatgctgctaaggtacatctaaatctcctggctgtttagtttggcattgattaccatattgattctgttttaatgattgaaagagaggctcactagtttcttgtattggttatttgcaaaaaaaaaatgatggatggtttcaagtgcattgctaaggaggctgagttgatttctgaatggctgaggcatgggcgccgtatgcttaccgatgatgagtacaccttgtgccatgaaatccgggctgttgcttgtaaactttttgttatccgtggggagtggactgttgatattgcttctgcccttctggtatgtgcatgcctgccttcacctaaccacattctggtatgcttgtctaaagtttgtgtcacttgaatttgatcaatttatttgcaccatcagggtatcagaaaggaggctgagtggttgattgagaacttgaagcgttttcctgttgaatccattagtacctccatgaagattcgacaatttgccttggattttgtgtgggaaaagattggtgagtatgcatcatataagaataaggagagcagtgaaagtgaaatggcttctgaaagtgatgccgatgtcactgaaagcaatgataacgactatatggtacggtgtatgttgtgaaaaatatgctcttgattttactcaatggagatatcaatctcatgctacatatatagctgactcacatgtatggttttggattgttgccaggtttgctatgacgaagactacttgaaacttggtatatgaacgcatgttgagacttgagaccaaatatatcaggcacaaggtctcgcccccttcacccgcacacgaggcaatatcttcatgatcaaagcaagagtaaagtaaagactgagttaactagatatctcgaagatattcctcaagaaaatgatttccctgatgatgattttgacatactccagtggtggagggtgaactcttgcaaatatccaatattatcacgcatggcacttgatttgcttgctgtccctgcatcctcagttgcatcagagtctgcattttctactggatcaagaatcattagcgactataggagtaggttggctagtggaactgtggaggcattggtttgccttcaagattggatgcgagccgatggtatgaagcctactttagttgtgcattgctacttatattatgggccatgaacttatttatgttgaacttttgtattctgatgttttaggttttggtgatccatattcaattctaactgatacggctgagggcgatgatgttaatatgcaactattaggtattcaaattacttgattttatatttctgtatgtctaattgaatatgggtactatgatgatctaataataatttacaatttattctacatttgcttcttaaatgagttgctagatctggaaaaagagttgtgtacacatgctgcattaccccctcaccatggtcataaaactgtaactgaattgtttctgttccttaaatagtactacataattttatcttcatttctaggtagtttggacctctctttttctgggggtcagattcacttctattctgttagattgcttttaaattcaatccaagatgttctggcactggcaatgtagattatgttccaacttttaacccctttttttgtcactgggcaggacattaaatcatttgacatctcaggcaaattaccatgtgagttctatgcaatctgggttctgagaaattttgctagttctggagcagtggtcagtggagcttgcttagtttcccagctcatatcagtgtttcccacacatgtcagattacatccaaaatttgtatgatgtattggaaatttagttgagcctgggatttctggacttcttttctgccgttgagcctgaaattcatatttgattttgcctggtgaattctgcatgagtgacaggaatagatgcaaggatcaggcggctttgttgctgtcaggatatgcatgtcttttgagtcctttttttcccctttatgctgttgttaagctatgaatattttggaaagggatttttttaggacaatttgattaaggatcggtggatttttatgccaaattgtagactctgcttttcgctgcagtcactgtctttcagaagatttcagggctcaagatggttactaatatttactgattttctgtttcatctgaagattcacccctgcaagcctgcatttttgcttatactgaagaactctgagtcttcatgcttgcataccatatatcgcagttttttttcctttcattttggtttaattagcagatgtaattgatgccacagttgaagagaaggcagtaatttttcttgcattgacagtgacaactaatgcgggcgtgcggacgcgggcgcagcctgcccgctccagccgtgcgggcaatgcccctagtgcagtctcctttcgtcatgggtgatctgatcattggtccgatgcttctggctaaacctattcccagtggcagtgtgtgtgtgcaagaagttcaatgagtgctagtcccgatactccgacttagaaattaacaacctctcttctgctcgcacgcagttgttttattttgatgaatttctctcggacaaacttatctctaatcttacctgtgctgtgcggtatcgatctacagtccattatgcaatgaataatataatggctcgcctcagtccgccgctactgccgtgcaggccatgagggagcacaagtcgccgcgctgctcgatccgcatggcgatgacgtacgtacatgctcgcccatggcccctcctgctctgcacaagtcatagttggcgtgaatcaagtgaacttattcctagttgttgggctgtgatgtggtgggcggcaccccatctcgccttccttctttcacctcccaaaacgatcgcaccgtcgtctctttcctccgctccctctccctcttcactctccatccgcttcattcttcatcatgtgcgactgcgaatcggagggaagggacgctcgatcggcgtccatggggaatatcactaaacttgagcgtgctcgttcccatgtcaacacttctcaaaccctaacatcctcctcagtttcggacaagtgcgagatccgattccaaggcggtccatcccgaaaaatttgataatttgacacttttgtgaggatgacatatgggaccatctgagtgaataaaagtgcgtcaggatgtcaaataatcgaaacccatttgaaaagagtgttaaattatcaattttgacacagcttcttcttccccaccgctccatcttttaaattgccctggtaactcccaatccttttttgttttatttaatttaattaattccctctactgtcgttcattacattaacttgtttttgttttttttcccatgtggcttcctaatggcgaaatcagatgaattcaaatcactaggaacgaacagactacttccttgtgacttgaaaaactctagtccgtgtgctttgcagcagtacaatgcctaccttcactggttttactactttcatacaagtcttgctcctcttgcatctcttgttgatgctgcctccatggtaactcccactctatttctctgcttgcttacctctacgaaatcactacaaagttgcttgctgtgttgggtcatccgaaatttgtttttcttttacagaaactatgctatgctaaaaaaaggtctaagtcattgcatttgtccaatacaaatttactgatatgactctaatactaaattcataccaactgtttaagtgttaacaaacatgattttaactgttgttaacgtacttttatggacacgtgatgtaaccgtgtggtccattttgttccttttcgtgaataaataggatccaaataattagaattagactgtcacgagaaaagccctattctgggtacagtcaaatcttccaatacggaatagtcgctgtacaaaaacctcaaatccaaatggggcttcactatgaaacaattctttgggtattttcactttttttaagcgtttgaacctatatgctcccagccctgttgcttcattcattgggctgcgtgctgtgacactaactgcagcctccatgggaggcggtttttgtaattgctccgtagctccttcctttgtatgcacatcaggattcacttaaattacaccatttatctttcaaatatatacttattgggaatgatatgcataagtaatgatgatttctttctttgaaagtgtttggagaaggagaggagcatggtgctcttgtggaaaaatgcaagagcttgtacttatattcgtgattgcttagtgggtgaatgcattgtgaaatggatgcgtaccgcgattaacgtaaaagatgaaagaaaacgtccatttggcatcgatgctgctgagatacatctcaatctcctggctgtttagtttgactgattgattgccatattcattctgttttaatgattgaaagagaggctcactagtttcttgtatcggttatttgcccccaaaaaaaatggtttcaagtgtattgctaaggaggctgagttgatttctgaatggctgaggcatgggcgctgtatacttaacgatgaggagtacgccttctggtatgtgcatgcctgctttcacctaaccaagttctggtatacttgtctgaaatttgtgtcacatgactttgatcaatttatttgcaccatctgcagggtatcagaaaggaggctgagtggttgattgagaacttgaagcgtaataatgttgaatccattagtacctccatgaagattcggcaatttgccttagattttttgtgtgagaagtatgttgagtatggatcatttaaaaagcaggagagcagtgaaagtgaaatggcctctgagagtgatgaagatgtcgttgaagaacacacctactatgtggtacggtttatgctcttgattttactcaatggagatatcaatctcatgctatagttgtctcacatgtttggttttggattgttgccagggtgacctacatgatgaagactacttgaaacttagaaagaagaagactacttgaaactttttccataaacgcatgctgggaccaaatatatcagctgttttcttttgatgaatttctcttggacaaactatctctgatcttacatgtgctgctgtatcgatctacagtcgtccattatgcaatgaatttcctttttctttcggcatagttatgtccgatcttattattgaacctttgtgttggaagtggtatggctgcgtcatctgctatagaacgccactaataatactccgtatttaccttattagtgctctgtgccaggttgggcatcatatttttgaaccagttggtaatgggcatcaatggtcgttcgtcttgttggtctagcggcggccttcggtctctacaccatggagatgcagatgcctcctcgtcgatcagtcgtcgcctgcgtgccccgtcagccgttgccgctgccggacgagctcacgaatagctcgtgtggattgcacacgtcacaacgaacaaagtcaaaaactgattcataggaatcatgcattcagagagattcatatgatccaaatcaaacagacaagcctgcaatcgataaatgctactaccttcgtcccataatataagaaatttttcgtggatgtggcgtcaaataatctctacggactgcgtgtactctaataaataaataatcatccgatgggatgggccggaaagagtggctaattgtgctttcagttcacaacaaagcaaggaaagaaacaactcttgttgggccaacaataatgtaatgtaaggcgattgccacagtaaaattagctattacttatgcaaccacttatgtgcatcatgcggtgcataatcaaagatgataatgtggtgtacagtggcatttatcagttcaccaaaaactaagttaaattttgacctatacattgagaaaaaaaaagataaattctaatgtgaacaataccgctactattcatacgctaaatttatctttttcacatcttcatgtgtgagttgagtttggacctaaattttttttagagtggtatatatattgggtgagtgttgtcaaattcttcaagaattttatataactgttcggatggtttttaaaacgagagggggggggcatcccctcgataaatcaaaatagtttcccgcaacaaatccaattatagatgtcaacaaaaatggttggggtattcttttctaggtgctctacccttacaaaaggaatagatggaggaatgtggtcgctgacatgttggcttatagacaaagacctccatatgtcagtgaccacgtcacagaggcaataatggtagaagatatgattctcttgcaaaactactagatgttcctgcgtagttttacattgagcaatatttaaaaatatacaattaaaattcaatatacaactcttactgctcatatgtttccgtaactacaattttgtttggtatataactcaatctaccttaaccaccaccatataatctaagagcattgctccagtccagcatattgtacctcgaggtaccggtaccttgaggtaccaatttaaatccggccgttcattcacggagggtaagattgaaaatctcacacgctaagcagctcgtgatgctccttctctctgactaagtgactgtgtcaacgaagactccaagagcaactgagcaagtccaaaccaagagcaagggcgtggtgggagcgggatgaggggtggtcggcgccggtggtgccgggggcgtcggcggcggggtgttggacggcggcgcgttgggcgccagcggtgtctgcatggtggcgaggtaacgaggagcaggaggggtggtcggcgccggtggtgttgaacggcggcgcctgcgtcggaggctgctacgcggcggcggaggcgacgaggacctgcgtcggtcgccgatgtgctcgaatccggcagcgagattaggggaagggccgtggtaggcgtatgtcaccggcgagcttggaggaagtgatgcacggaggctcttcggccccctccacctccactccggctagcctgtccatccctggtgagagccatcgatcgatgcaggcatgcagcatcttttggagagagaaaagacaggaggaagatgaagaagatacacgcgaaattacttaactacccttgcttctttagtacctctctatgctctgtaaaatcacgtggacagtactactaggtacaactctttctcacccgttggatcaaacgaaatcgatggctcaaattgcatataccgacaggtaccaaggtacctgctggacagtaaaaattctcataatctaaacatatttcttctctccctatgatgaacgtgatggtttttaggccttcaaaacgatagcgatgttcattttcgtcatctatttatagtaactagagataacgctttggacctgccctgccaccaggatgcgagttggatgctccaattcggattgggtgaagctgggagttgggaggcaagataggcacagcaagtcgggtcgccatccatcaatcctttcattcatattggccggcccattcatgatgaaataatgttgttcgattggtatatatcacaagcacacatgcttttctttaaactattgaagtgttgttcaatggagtaattaactctggtaggaatcggattcagtgatattcatattatccaaaataacagtgaagcctgcaatcgatattcgatactactccagtactaaatgctagtgatagtattagcgttgaatgatgctagtacgaagttaaagcgaagtatgcagatgcagccatgcatggaagaattcgttcgttgctctccagtctccactctctgcagtcgtccgtcatcagagatggaactgaaagtactgtacacaggagtactccactctctgggctggacgcatcatcacaacctatagtgatggtagtacgatgcagtgcaggcgatgcaaacatgcaacacatcattcatcaatgatcaatcagtcatggactcatggatatggccagactgaaaagcttaacgcattttctggcctccctcctgctgcagcagagtgtactccagtagtatcaaagacacaaagaaagaatcaagaatggtacttgaggtctgctttacgtacagaaaaaagttatcatggagatagcatgtactatgtgtgcgtagaaattgctgtagtagatcgcatcagctcatccgaacaagaaggtcgtggggcttgtttgggggagcttaaaattctaagaagctactgctgagaagctagctggtgagaatctagaaaagctaggaaacctagcttctggcttctaattcattttccagattcttgctaggaaacctagcttctggcttctaattcatttcccagattctacaactacagattttcagaatctagataaaaaactgaactgtttggaggagcttctggctactggagattctagaagaagctgcagctgctagaagctccccggcctagcctcctgccaaagtgccaaggaaacaaaaaggaaaggaagaaagatggggcaggttaggttaaggtgggctggaaattcgcctcgcccttttcgtccaagttttgctattcatttcacacatccctcattagtcacagaaattgctcaccaagtcaccagtagtaagatgtagtattactttagtgtagtaagtaaaaagaggcacataaatgatatttaaggcaggaaaatggggatcaattcatttcacatcatcttctaaaacccttgtatgctgaaagaaagagacctgctgctgctgctgctgcagtgcttgcatttgttcggtccagaaacaacaggctgccacagtccaagtcaaattcaatcctttttttgcgctgtgcacatgcacaggctgctatatttttcctgcaactagcagtatttgcctggcttcattggccacacctgctgcagatattatagactccttaacatgttaatgatgcaagcacagcaacgaaagcaacatccccaattcggctccgtcattggacggaaagcgaaagatcattcgattccttatcaaccatcgcaaattcgcaataccattccctaaaacaaagtgcaatttgaagccacatttttccccaacacctgaatttcagatttccacagtattactccagttcaaaggaaagtgcttgatgaaagttgaaacaatctccattgctctaacaattactgctcacagctattgagccatagggcacagaaaaaaaaatttctaccactagaacagtttttaacagacaaactgagctaacgatagatggcagtgaagtacgagcgccatcttgtccaccattatccaattattaaagccacaagacaggatcttggacgatgcagtacctatcatcatcatcatttcatcaagcttctgttttactactagtacaatccttttttttttaccaaggggtgtatatgtacttatatctgtactgtagctttttggatcaggtaactttacggcacactatctgagtatgtaatcaagcacgaacaaaagaggcagagaaagagagaaaggagtagtagtactaaaacaatgttgttgacatccaagctcacttttatcttaatcatttgagtaatgcaaaagaattactgctagtactacacaaggagcactaaagcagcagaagcaaacgcacatacagtgggagggcagagacaagatgatgcataagcagatacagagttgaccatcttgagtgttatccaggatgaaaaaggaagtgtagaaaagagaggagcgaggaaaaaagggaaaggcagagagatcgaaagggatcacacccactgaacacacaaaaataaaaaggacaaggaagaaagaaagaaaagctaagtgcaagcgcgccttcattatcgtgcactgataaattaaacagggcaccaaccaaaccaggcgcagagacaggattcctccacataaaaaagttggtttgccaccgagacgccctcccccacccccacggtattattctaattccagcgcagcgcacatgcacagtgcttgctgcttactgcaacattgacattgcaatgctatccaaagactctaattgacgatgaacttgcagtttttgcgagcatgacgataatgataataataagcatatcatggtactactagaaggaaaaaagagtgacagagacatagcaactaacagtcacaggcaggcaggcagccaggcaggcagcaggaagatgcattcttgattccgtgtgtttctccttgcttattttgtccattcattcattctcaatcattcatggtgataatttaacacatgaaacaatccatacatacatacatacatacatggcatacgtacagaggagctgagctaccagcctaccaacaattacttattattactattattctccccaagcactaatccaatccagagatgaacacaagagcaacaagaagaagaagaagaagaagaattctggacaaaaggcctaaagagctagagcagcaagcagacagaaacagaggaacaagtgagacgacttacatggccttcttttgggtcaggtaaatttcttttgttcatttcttggcacagcatttgcagctgtacatgtgattgacgccaactatgactcgtgcagcagacaagcaagcaagcaagcacgccttcttttctttgtcttgtttcttggagcagcatagcacaccgatgcaacgaaatgaggaaggaaatcacaaatgaatttagagatgtccacactgactgactagaaatcacacgcacgagagagcagttcccctgattactgcaaagcaagcaaggcaaggcaagaaaaggaagaagagtttgtttttcatcttgttgatggtggtggtggagtcacggtgcacagcaggggatggatggatggatggatggatggatgagagaagcagagacctaacctaatcagcggctaaagctcctatgtcaacccaactgggaagaagcaaagagcacagagcacagggctgaaatttgcactaaaaccaaccatgtctgatggctcaattttgctgagcactgtaattgttgctcctgctccatcatcaattcggtcgaaccctagaaatcgaaggagaaaaaaaaaaaagaagagcagcaagcgaagcaacgtgacttgcgactgactttgagtggaagtgacacgcagctagccagaggaagaagacgggatgggaatggaagcaaaccctaagccctaaataaattaaaccctagtaactcagcgggcgctctcctcctcgggtcggccggtcgccgccgtggccccggcgcctcctgggccgccggagaaggaggcgagaaggttgaggttgccctgcgccatggggaggtagttgccgaccctggcggcggacgcctccccaggcatggcgggtgcggcggcggcggcgaccatcatctccggcgcggcggcgaagctccagagctggccgaagtcagccctggccgggagcgcccagaaggcctgggtgggggcggtggcgtcgggagcgggcgcgggcgaagtggtgtggtcgtcggcggcacggaggcgcttgccgaggatgaagggggcggcgcgggggaggaggaggtcgttggagttggaggtggagttggagcggagggaggaaggggaggaggtggagaaggaggccggggtggtgccggtgccggtggcggcgatgatggagggctcggcctggcggaggagccactcgatggtctggccgtcggacttgtggccgagctcgcgggtgagctggaagacgcgggcggcgcagatgatgggcatgcggatgcggcggccgcggccgtcgaccttgctgtggcggtccttggagggaggcttgcgaacggcgagggcggtgccattggcgttggaggccgggacgagctgcttgtccggagcgccgccaccgccaccgccgccgtctggcctggtcgtcatgaggagaggagaggagcggagagggggggttggggaaggggaagtggggtagtggtgtggtgtgtgggggattggttgcagtgccactggagagaagaggaggagacgccaatgcccaatgcaatgattgagggagggaggaggaggaggcgagagagacgacgcggctgggctgcacctgcacctgcaacgacgagacggaggagcggatcgagccggtgcacggccacgccagacacacgggctggacggcacatgggcctgctgtaggggcccacctaacccaatctacacactatgactatggccctcctggtggggcccagctgttgcctttgtgggcccaactgtgccgatggtcggaagggtgggagaaaaataaaatccaactatacgccctgtttgttttaacttatgattattataatctagattattaagccagattactataaactggattataataagctggcataaaataagctgtgagttgtttgtttgtctggattattgaaggcatggatcattgggtttgaatggctaaagtctataatgccctcagctatctattcggttgatgacataggtggataatttttctcaagtatgtaggggtagtgggtctttagccactcaataatctgaaaaaagctcttttagagcagcttatcagattataataatctggcttatagattataataatctacttgtttgtttcagcttactcctaataaactagattataataatcctaagctgaatcaaacagggccttattatcccctacctcctccactttcaccacatgcgcctctccatattgagccaccgctcgtgacggagctaggataaaattaaagcggggactaaaccaaaatagccaataaaaattgaaacatgtctcatataaattagctatatttataatacaaactataaatatatggattataattttaggggagtattatgggggctctaatacgctgtctccaccgttggccaccaccaccggttgccttctttttctacccttgttcctcgtttttaacagtataaattccactaaactacttagtatatgctttcatcaatctatcacataactatatatttaaatattatgtaccataaaaaactacagatttaatatcatatctttttactatatatcgacatatcatataaaaattacacatttaacatcgttttatcatcaaactacaacttctataacctcaataatactacggatatatactctaaaatatgtggcttttaaaaaaactttattactcaatttgtaattttgagataactgtcatctccgttctctcctaaactcatttttgttttattgtgcatcttctagagactagccaatgaaagattcatttctatatctcctgcacattaattcaaatgaaacaataaaatcccattgggaactacgagcttgttcattttcttaccatattcacaccttattaatttttggtatgctaacaaaccaaacatatccttaccattgtcactctaccaaactttggtaattccgaaagtttccactctcaagttaaacattctaccaaattttagtaggttaaacatccaacacaaccaagttttgataacactaaaatgtgccaaaatatgataagattgaaagtgctaacaaagtgaactagccctacatatatatcaaccattcagtctctccttttttttaactttggaagagatgactaggggaggatgctcaaatttggccaatcaaaaaaaaaaactgtccaatgcatttggatatatatagtctgttagggtatgttttttttccttggttggtatatggctaacctcaatctcttagagtgttcttttacgtgccttgaaccaattttttttcacaggatagattgaaggaaggtgtgttggcaacaaaacaagctgaaggcacaacggaaaccaaccgtagaggggtgccgggtgcaaatgcaatgcagggtgggtgaggcatccctatccgcgggattttttacattttggttcttttaaaaaacttatttcacaaatagacccctaaaaaaacttatcctagaaatggtccttttaggggcaccagagtggctggcgccgtcatcaacgggaccgtcctcctgccaccgtggcgcacgcgaaccgaagtggcaggaggagggcgctagccatgctggcgccgccccagggaggagggtgccagcatggctggcgccgccgcctccattcctgtttctctgtatggagttgcaacggtgtcatttttattttattttttcggattttttttcacactcaggatcacgatacaaccaaccacaaaaaaaaaatttaaactcgaactaccacttagctaagtctgaaaatagctagcataccacttagtatactttgcaccttcactaaaattagaccataattccattagtaaaaccctttgatcaggatgttaaacataatgcactctaccactatatgaaattacttaatctaattcaaaatataaccacatgaaatgacatataagttaaacagtacatagagatgcaatttttttatttttattttatttttttgatattttttcacacttagaagaatataggaaccaaccgtataaaaaataaactcaaacggacaaaatatgtgacttgtagaattttccaaaactctaccgaaacggacaaaatatgtcatctattaaaataggcgtaactttctcatacggactcggaatcaggcaaataatatatgcacagacatctacagaaaaagttacatccgattctcccccgctttgccgggtctggcaatattaaaacctccaaatttcgcttgcaagattgtgttttcgaggagagaagtttttcggtagagctttggaaaattccacatgccatatatttcgtccgtttgagtttattttttacatggttggttcctatgagttcctaagtgtgaaaaaaatatcaaaaaaataaaataaaaataaaaaatttgcacatctctcctttgcactagttcggagagagaggagaggagaggaaaaattctataggtcacatattacgtccatttgagttcaatttttctatggttggttcttatgtgtccctaagcgtgaaaaaaatatcaaacaaataaaacaaaaaaaatttcggggggagggagggcgccagccactctggcgcactccccctagccacctcagcatcgccccgccacgtcagcagggggacggtgccagagaggctggcgccgtcctgttggacgacggcgccagctactctggcgccccaaaaaggaccattttggggataagtttttctagagatctatttgcgaaataagttttttaaaaggaccaaaatgtaaaaaatccagtccctatccgtccgtaccaatccaaccaggtctcgactccactcgggtaaatttagagagagatgaagggatgcaactgaagcctatgtggcgtgggccctccgtgtcgggtctggtgggcccatggattggattcaatccttcgtcccgttgggtttgggttgggattgtgattgtgattgtgattgggtgacgtccgtaattaagtgacctggcaatgcgggacgacatgttgtagatttccaatccaatccaaacgacggatgccaagtgtctagcttcacctttttttgaaaccgactagtcagtctcagccttgtggtgttgttgtacatcaatttttatgcacaaccaagcatacaacactgctcatgaaccacactgtactcccgccatccatatgtaatagatttatgagtaaaacatatccaaaacaaaaacatgcatgcctacctgaacctcaccactacaacaagctcacacacgtttacattggacaaggtaggtttacctggcaatttttatatagcaggatatatcgcacatatatacatttcagtgaattaatggaactgaaatcaacaacacgctggctagatcgacaagcctctcaacttctgctcttgctcgggtaattgcaaaagagaatgaataccatacagagattatcattttcgtaagtacgtaaaacaaccgcaagacatgattacgacacgatacgcttatacacactaattataatagtatactcattgcgtggaagaattagaggagctatctagggcaattgtcaacctattcattcatactacttccgtctcaaaataagtgcagccgtgaatatccgtacccaacgtttaaccgtccgtcttatttgaaaaatttatgaaaaatttaaatatatttagtcacacataaagtattattcatgttttatcatctaatagcaataaaaatattaatcataaaaaaatttcaaataagacgaacggtcaaacgttgaacgtgaataatgcaaaactgcacttattttgggacggagggagtatatgctatagatctggggcccaccggaaatcccacctgatgtgatcctacttggaccaatggcctctgcccaccgtgcatctgatcctatccacaattcgtactaccacgtggaaaaagaaatataagtaaaacctagctacatactgaaaaaggctatgagcaattatatattactcaccaaatgacaaatcagcctcttcctaacctttttatttatctctcgtctcttgcgatactgctgaattaatttttattaagctagctatacattggctatctaatccaatcaataattggaagcatgtagagtactaaactagaaaggaaactatattattcattcatcatctattactataatactgaaagattaggggatagctgtaaaattaagcggggaatagaacttaatttcaggaatgtgtgctgatcactacagtagcttccagtcttccaccttgcaggaaattaaactgtgtgaaaaaaaggaaatgaataatataattaaatccctataagcacacatggggctctttcataattttagtccccgtaagctttcttgcccatttcctaagatcacaactagcaccctcgtaaaacaaagagagtaatgcatagtcagtaatgcactttttgggaagaagataatatttcagagcggatagacatatacagtatatagtatgtgactacttaggacttgtatgaatgagctcaagattctgagaagtagcggttgatagttaacttctaagaatatgaaaaggacaaaaactagatttagagaaggtttttttgggtacaactgtaaccgccagaagcttctactgttttttttctagcagtattgtacgccagtaccaactactgatgcacaattttgaacctcggatccctaacccactctacatgcatgtactacctccattccaaaatacacggtctcatcttttcgcttatgcttatgcttatcagccaaaatttaaattttcaaccttaaatttagagttgattttagggtttttttttcatcgtagtttattttttagcctttacttttagatcgctaagaacacgtatataaaagttttattcacaaaatatttttcgtttacaaataggacgtttggcttaatcctagaatacggttgatagctatttctaacacaataccttatctcaaaataaaaatatttctccacctacttcctctcaaccaatcacaaccattctctttcatctactttctcttctcaaccaatcacaccctttctctaatcatttccatcctacattttgcacggagtaagttttattttacagtaatttgcatgtttagtttgcatggatggaatcagtgccctgattgatgggacatgatgaagctaccaaattactctatccatttcaaaataaatcaactgctagagtttgaagtttgttctaagataaaccagctcctaccttcttacctaccaccaatccgcaaataaaaaaaatcttattacttcaataccgctcacgtacccatcaactaatacaattttcactaactaatggtattatggtcttttgttcaatttcttaaaaatttattgggatactagggtttgaggtttttttgaacggagggaatactccctacaaacatagtataaaatgttatttttattttggaatgaaaggaatataatacttcctccatcccgtaaaaacaaacccgcgattagacgtgacatattcaaatacaataaatctagacgctaggatatgttacatccaactcttaatttgtttttctatcagacaagaaatatgtggtaatagtagaaaattaatcataagggccggggctgggtgtgggggccggcacaaggcggtacggtgtggggatgcaataaagcaaatgcatggatggccctaataactgaatttacaggcggacaagcagcagcgactgggtctgcctggctggccaccagtcggtccgtccatcatcgatctctacctgtgctgtacgagtacatactatacatgggatgggagggaccatgcaaatatgcaatgcatgtgagtttcatgcctagctcagccgcggcaactgcacgtaccttccttccttacctaccagtgcaccacacgccatcgtccgaccgtcttatcatccatcgatatacatatcgtataccggtccgctcaccatgttttcttacacagggttcaaaatttccggagggaaactttgggtctatcagacattcagacttccccgataggaaactatttcacccaaaaattttggttctttccattttgttgtgaatttagataaaattattcaaatttgaccaatttttttcaaatttcaaataatttggaccaaatatccgaaattttggtcctatcgatacccccccccccccggtagaaatagcttaaccaatatattaaatcttactctttccataataccgtattatatgtcattttacatttgtcctaagtttttttttctttttatacttttttacaaatttacataaacttgaaaaggttcgacttataagagaaacaaaataacttacaataaggagcagggagtagtagctaactcaggccctgtttagttggggaaaagaaaatttttggatgttacatcgaatgtttgaccggatgtcggaaggagttttcggacacgaatgaaaaaactaatttgataactcgcctagaaaccgcgagacgaatcttttgaggctaattaaaccgtcattagcacatgtgggttactgtagcacttatggctaattatggattaattaggctcaaaagattcgtttcgtgatttcccccctaactgtgtaattagtttttgtttttatctatatttaataatacatacatgtatacaaagattcaatgtgatgtttttgagaaaaaagtttttagaactaaactgggcctcatactaatacggctggcagggccatcgtcgatcactctgcaaagcaacaaaaacaaccactacgccaagcagcaaaacaggcactgcgccaacagggcttctctctctcaaagtctcaactactccagaaaaaagatagacaagactttccctgcttccgctagctagagacaagcgcatggactgtgcgatgcagccgatagatcttttttttttttgagagagaaaatgcagccgatagatcttgatgtgtccaggctttgatttatcaacaaagattgattgtaatcagtgcgcttaattaaattgatttcagctctgcagactcttgcagttgcagagctcacaggtagtatcaaacatcagtggcaaccagacttgcatgccagattttctctaatcagtagcaaaggcacatgaacagatcaatatgtactccgtataaagcttttagttatcctactacatgcagtcacggtggttgaagtgggcgggctatggcttaatataatcagctacttaatatactatggagtatctaattgcaacatttgtgggcaatcccccttttcggctgtccgtccttaattaatctgggctctattttttttattatttctggttgctgttagaatcaggtgaagattctcctggtagtatatgatatgatccgtatatcctaaaaagaagggagccaagactaaaaatatttggttttttacatacatataaatcctcatcctcactatatataattcatagacctgaacgattgtatcagtttgacacctaatttgaccagagattatctgatttgtgctcggggtaactgggaccggtacaattaattgtttgttactaaattgaattgggccagtactacatatggcccagcccgaataaacaagcgatccaaaatatgcggagatatggggggcaggcctatatatagttatgggccccctcaaatagtattgacgtccacgtggtcttttgcatagtgaacgtcctgtgtgggttgcaggtcaatctgggagtgattgtatacagtagagttccttgtctttctactttctacactagtttctactgtacgagggtagtcctcagaaaaatacagcggtaaatcatcaaatcccactatggttaccagctctatgtgttttgtttagaccaagtacacaattaagtgtttaaagttatgttaccaaacgggcgacactagtgtggaaagaaaacacagcaagaactacccacaaactaccctgtatattcaaacttcattgacaaatacaaccaaatggttccaaacatgacgagtgattatactgaatagaaaaaaaaaactaaggtcaatgctagatgcataatagtacttgcctggataactggatcattcacctgaatggctccaccatgaatggtactaaattggtacatgtcagaattgaggtgttcccaaattgatgaccaatccttgcatgcacattgcaaccaacacagagcaggaaaagaaaccgcccctacggcctacaggcaatgcattccatgtgatcagatattacattgcaagagacaagaattttggttgcaggagtacggccatagtttgcacaaaattgataactgaccttgctgaggcaaactatctcaacattgagaatttgagacagaagaatctccaccaaaaaaattggtctattatttgatttcatcaacattccaacacatatttttctgcactgtaaacattcacgatccttattgaagaatactccaacaaatcaccatgatgaacctgtgtagtcacaagagagacagaactgctagcagtgaggaatcaagccataagtgaaaattggcaggcataattgtatagtgggtgaaactaagatcatttactaatttaaaatttaaaaagaggaaaaggaaataggattttacaggccgaccgggcaaaaagaaaggggaatttacagtaactatctgtgtgcaatagtggctgttttttttttttggcagattggactaacatggtcatagaataaaccccagcaatcatatgtccctcagaaatcatgccattgctttttgttgttgttcatttgacattgaagaatttcagcaagaaaagaatcaccttaccgctttgtcccaatgacttgatgcctgtcatatgaggccacatccacttctaaaaaatcattgcctctacatactgactactgacaaccggattgccattagtttcatcatgtatagtatgtctacatagcatagatcatcaattacacaacaaaaaagaaaagattagaaaatgtgaataacatgttctgaatataaaaatttttgagcatgtatgcttgaactagaaaatagctgacataatgcatgcagaaaaaagtggatgcagcatgggtcgtaagttcataacagcttgaaacatcagaatgcaatatgaggaaggaaatgaaaatagctaaaaaagatggcctatccagccttcagccctggaaacatggctgtttacccgagggttactgaatatcaagaataatggcccctagtgctgccaacattttttttatcaagatgcaacattaagcaatgactctgatatatgtttccagataatcttctcatttctaagttgttgaatgtactgatgatagcacatatagtatgatgatgttataaaccaaaagctctgccaagagctctagtggacttgaaagaactagtagatactctgggttatgtcccggaatcatgcctgaagtgcaattgacaacaactcaggttgaaccattgaagggaagctaagtaaaggaaaaaaaataaaatcaagcttcagaaagaatagaagacaaaagtaggttctcttgattatttgtttcctatcctttggaaaaaatggttgcattgaaaaaaaactgacagctggaggagggatacgcagattgtgagatttgcaaaataaactgacaggtggaggagagatacgcagattgtaagactgaaaacaggagcatggttctatcaagtacgaaaacaaaagaagatagcccaatcgaaaatgtgcgatgcatgtgaattgggaaacagccgatgaatcaaataatgtattatgatgacatttaggaaatgtagtgagtcatacagcagtgagggaaatcagtagcataggtggagattatacaggcataagggttcctagttgtacaaaaatattcttatcaagttgcagtaattcttgacatatgtaggcagataatcttgtcagttcagttgttgattagcagtgatgagatatcacatataggcagcatgatgagtagcattggtagcaaacccagaggtgtcccaatgggtttagtggagttaaaagaagtagatgtggttatgacaaactccttgggggtaattttgtccattagattggcaatacctgaattgcaattgacaaggctgaaggagaggtaaagaaattaaagggggaaaacaaaaaatggaatgaatagtacatgaagtagaaaacagtggtaggatcccttgatcgagattcattcgcatgctgttgtaattgtgagtaggaaaggttggattgcaagaattagagacggcattcgcggaagaaattaatgaaaataaaagttagtaagagtaacaaacgtttgatggacgtaagaagtgaattgcaggaataatcaccactgaatgaataaaccaatcgatatattaatattattgatgtaatttaggcaaaagagtgatgcatacagcagtgagtgagtaagtaaaatagaaatccctatgctatttattccttgctaggtctaggtggagttgcatccaatccacatggtacaagattagattagagcagcagagtgaggaatctgacggggaacctgggatgaaggaagaaggaggaggcaggtggagctagggtttaggagggggatcctccaggtccagggcgtggttgcgcttgcggcggatgaagtcctcgaggacacggcgtcggtcggcggccttggcgcgctggggctcgatgttggcgtaggagaggcgggcggcggcgaggatgagggcgacgccggtgaggaagaagcaggcggtggcggcgcgctgggagcgggtggcggtgtactgcagccacaccatctctccccctgtctctggtctggtggtggtggggaagaaaggagacgtatcgagggaaaatacgcctttgggaggggaacggaaagagtgtggtcaaaccttgaattgactcgtggatgggatggattcctttcctttccagcttccctccaaatggttgagggttcaaatttcaaaattcgaaggctactcctcctactagtccggtgcccgcgcgctggaggaggtgcggtgcgtgtgtgcgttggtacggctgcagcagccagaaagaaggaagtgaacggggtgcggccgcctgttttgcctgcctgcctgtgcgcgtctcgaggaggacatgacatactactagtacctgtttttttacacaaggtccccccacattttcttgtttctatgattgagtacacttcggccgaatttagttccatattttttaaaaaaaaaaacttccaactttttcattacatcaaaacttttctacacacataaacttccaacttttccgtcacatcattccaattttaaacaaacttccaattttagcttgaactaaaacacacccttcccttcacccgattccattcatagggtgtgtttagttcacatcaaaattggaagttttgttgaaattggaacgatgtgacggaaaaattgaaagtttgtacgtggatgtgtttagttcacgccaaaattgaaagtttgattggaattagaacgatggaacggaaaaattataagttagtgtgtaagaaagttttaacataatggaaaagttagaagtttgaagaaaaagtttaaaactaaactcggccatagtataagagagagagagaggtgttgcttcgaccaatctctacaaacccagccataaaatcacacattcaaaacacatagatcacaaactccttctattgcttgcttccattgtgtacacagtatatcttcgctagttactcatttacatgtcccctccgtgataaataatcaccatggtttacagcatttttaataatcagacaaaacaagatgaaatattttcactatgcgtgtgtaccatattacgtgtatatatattgatgattgatgttactgtaaaaaaaatacaaaatgcacgtaaacagaagcaagagatatacatttttttagagggaaaagatcaagcttaaacgactgtacattttaaataaggtgaattaactgtacattgaacaaatgctttttttaggtgttaaaagagagaatgatggctatggtctagacgcggagtactctattatgcaatccactccttaaaatataatataaaaaagcacgtaccaattttacgcgggaaaatttattactatctgttatctaatcatcatactctatattaaaaatgtaacctattcaaataataacggtggatttagattgtaaccgtcgagatatcgactgatatagttatatacaaaatatggactacgtatatttcgaaacaaaagctattattgtatattcaatcaattcatacatttaaaaccttgtgtcccgctcaaaattgcgcgggaaaatccatacgttagcaaaacatcgtacatatactatgtgtttgtgcgtaagaaaaaaaaacgctcaccacctcacggagttagtcgaaagatccctgaacgtttcttcttgtgtttgtgcgtaagagcttcctaaggaaaacactagtgaaaacttgaagcttaatgaccatcatatttatatataagtaaccagttgcatttgcacggtattagtattatttggaaaattggatatgcaatgtaaagcacgggcatgcattcaaatgttgtgaaagcaaaacgaaaaaaaggaaaaacttggaggacctttttgtaactgtggttggaatattggaagcgcgggtaataaaaggaggacacttgagagcctacgccgcagccgccactctctctctctcgttttgccccaatatcaataccatcgccgcaccgccatggcggcggaggaggtggaggcggcggcgatcgacggatccggcgaggaggcgaagcggaagagtggtaagcagaggggatcgggcgccaaggggaggcgccggaacggcgaccgggctttccgcccgccggcgatgaggccggaggaagaagggcgcggtgttgcgacgaggcccggggcgctcagggaaaggaagccgccgcccaacgccttcaacgcgccagacgatgatgaggtagggaatctctctctctccccccctctgtcctgtcatatgtgttgatcaaacagcttgttcttgttgctaatcaagcagccattgcagacgcagtgtgttcaatcaatcaatatacattttgttttgtctgttcagtttccgctcgagtatcttccattccattccagcaaccgtgtatcctctgtatcgaatctgaatctgattaaaaaaatactagtactggtataggatatactagtacggaattattccttcgaatccgatccctttatatcccaaaacatcttgattttttcccctagattcttccaccattgctttctcatctcatttcgcccgattgctacaaatatctttaaatttatttacgtcaaagaaagttacggtttttcggttctttctccaaaatgctatccgttgctgtttcagtgtttgtgcttttatctactccatccgtttcatactataattagtttcacttttttccctagtcaaacttgattaagtttgatcaagtttatagtacaatttaacaacatctaaaatgtcaaattagtttcactaaatctacattgaatatattttaataatatgtttattttgtgttgaaatagtactctacatttttctataaacttagtcaaaaactcgaacaaacttaactaggaaaaaagtcaaacgacttgtaatatgaaacggatggagtatctatctagtatggattttggtactctttgagggagaacttataaagttatactgaccaattgctgttttgccaataggatgtcgagaaaactgatcaacttctcgagcctctcaacaagcccaaaagacgtgatgcagggaagaagagaggacccagaaaaaagaaagtggatcaagagaacatcaaaacccacagggtaaactactcaacgttccttttacaagttatttgggaacggtttggtttgtgacatgtacgcagttcactatatatttgcctgcatcgttacttttgaacgtttcctactcgacctgctaccttgtgaacgagtacctgataccttctcaagctacctgcgattcatcgaccaagccaaatctcttctttaaattaattttgttttgtgggggcctaattatcaagtctccctagtaagatcgcagtttcaccgtcaattttagtcgctttatttattgcttaatgataaacccaccattatgtttctcctgaacttggtcagtttcaagattatttttttttagaagaagtttcaagattctatgcaagctggttttgcatagattttttatgacagtgcaagtgcttgcttgaattcttgtctttttagataatgtctgaatacctgttatgattcgatgtaactaactacatgcttaatttaagcatgttattgtcattcaaagcatgaaaatttcagaggtttcatgtacttgcttggaaggtgcacttttgtgttctttacaaagtgaaacataaccccagctctttgatattgataccgaaataacccatgactttctttcctcgacagcataacgcaaatgcagtaaaaggcaagatgttagtcaatgataaggtttcgaagactgaaaagaagcgtaagagaggagacacaggagcggcagaaaataatggggtcataaactacacgtttctttgtataagttttttttttaaaaaaaattgtataactgttttgatgggtgtgctaacttttcgttgtttcaattatgtagaaagggaagaaaatgttgacaggtgaaaacgccttaatgtgtcaccaatgccagagaaatgacaaagggagagtggtctggtgcaagacttgcaacaataagcgcttttgtgtgccatgcattaatcaatggtgtgccaagtttcctcaaacttctagtctactagttggactcccagcctactgttttcctataggcttaaatgtacattttgctttcatcttacccatagtcccataacacccattttttctgcttacattttttatggtattattcttgtttcatcttatgtttgccttggtacatatgtttttatgcactatacctctagtaaccttttaaggtgatcccatgtgttgtataattcaactggacaggtatcctgatttgcctgaaaatgaatttgctgcaaaatgcccttattgtcgcaagaattgtaattgcaaggcatgcctgcgaatgagaggtgtcgaagaggtttgcatttccatctcatcttttctttacagcatttccatttcttcaggacatatttctttttaaagttaataaatgacactttctagtattcttactgaatagttcattccattcattgtgaagcagcctccaagaaaggaaatttctaaagaaaatcagattcgttatgcctgtcatgtgttacgcttgttgcgtccttggctgatagaactgcgacaggagcagatggcagagaaggaattagaggctaagatacaaggtatggttctctagcacacagactggaagctggtatggctatgaatgctcatcttgttttgtttacaggtgtttcagttgatcaaataaaggtggaacaagctgtgtgtgatctagatgagcgtgtctattggttaagttctttccttgttcactttatgctatgatataataccagaaagcatctgatccaattttgttgtcaactgcagcaatagatgcagcacttctatagttgattttcatagaagctgcaagcactgtttctatgacttgtgcttgacctgctgccaggagcttcgcaaaggtgagatccctggaggagaagaggtggaaattttggatcctgaagaaagagacaaggattatgcttttggtaagattctgtcagatggtgagaaccaaagggactctttgaagtgtcgcagcgacacccaaaacagtgagtcaaacaaaggcatggcttctgacgaaaaccaaaagaaggctctgttactttggaaagcaaacagtaatggtagcataccttgcccacgaaaggaaaaggaagactgcagtttttcatctctagatctgaaatgcttgtttccagagaagttgctccctgaattagaagatagatctgagaaggtcttctggagtgaaacatttgcaaaagaactaggtagaacaagtgagctgtgcccttgttttgatcactcaggcaagataagaagtgacagcaagaaattacgtcaggctgcaaatagggaggactcgagtgataactacttatactgtccggtggccactgatatccaggacgctgacctgttgcactttcagatgcattgggcaaagggcgaaccagttgttgtttcagacactcttaagctaacttctggtcttagctgggagccgatggttatgtggcgggcagtacgagaacgaaccaaagggaaggcagaagatgagcagtttgctgtgagggcagtagattgcctcgactggtgtgaggtgaggatctctaatgtgtttatgtgatagtactctttttctcgggtttggtttattgtactttaccacagttcatactctttttacatacctggcataatcttgattttatcttttggcagaaatacatgagatgatgcttattttcaaatgcgacaatgaaataatgtgtgcatgtgttgcctttccagaagaaagtaatacacataatgattaaataattgaccagtttaactaattttgttgatccattagtgaattgagcttccctattaaataatgtttgttatgtgtttctgtttgaaatgagagaaacctatctttcttcatctacagttgaactttctggcgcttactacattcatatctgattttccaggtggaaattaacatacacatgttttttatgggatatacaaggggcagaactcatcccaggacctactggcctgagatgcttaagctaaaggactggcccccttctagctcatttgatcagcgattgcctcgccatggtgctgaatttatcagtgcattgccatttccggagtatactgatccacgatatggtccgctaaatcttgcagtgaagcttcctggtggtgtcctgaagccagatcttgggccaaaaacttacattgcctatggattttctgaagagttgggcaggggtgactctgtaaccaaacttcactgtgacatgtctgatgcagtatgtctctattattataatgatgttttgttgttttgtatgaattgtgctcatttctttcattctgataagcgaataaaattgacttgctggttgctgtatacgtacctcatctgcagacattcaaatagatcatgttttctatcttgttgtttcttgtgctttatttgtttgtcttggcagtgattaattgtgaaaggtatcttttttatcaggtaaacatcttaacacacacagcggaagtgccctgtgagacttatgatgctgttcagattaaaaacacgcagaaaaagatgaaaatgcaagatgacatggaaatatatgggatgatagaatcaggcagtgaactcaagccatcagcatgcccagttgaattggggaacaaagctgttggtgaagcaccaaaggcctcatgcagcaaagaaaatgttcataccttgaaagacaagtctaatggttggtggagaaaatatacttttggtatgaaatgaatcttttagcccacttttaagttttgttgagtttattgcttgcacaatgcaggtttggatataaacgcttcaccacctgatgatgctggaggtgatgccagggatgaagcattgtcctatgaatctgtggtacatagtgatgtagctcagtgtccaaaccataaccatgagaccaataattctgatgatgcacgtattggagctcagagatgtcaaaagaaagctaaaggtcgtcctccgaagacaggttcaggggtatcagagcaccaggaaagtggtggtgctttgtgggatattttccgaagagaggactctgagaaattacaagacttccttaggaagcatgcgccagaatttcggcacatccactgcaatccagtgaaacaggtatgtctgcctctctatgctgttgcaactgataacaatacatattacctgtgttttgctgaccaagagctatgttgagtatcatcaattatgttaactgtgcaggttattcatccaattcatgatcaagctttctatttaactgcggagcataaaagaaagctgaaggaagaatatggttagtaaacatgttagcattagatcttgagttctctgcaatcacattgtttcatgaccatgcctgtttttatatgtggatttcctgttgcaggtgttgaaccttggacctttgaacaaaagcttggcgaagcagttttgattcctgccggatgtcctcaccaagtcaggaatttgaaggtgtgactgaattactgtaaatggagatactaatattttcccttcctcctgatatttgcatgaggtatatgggggctgaaaaatgaaaaaaaatgaagctaattttgaactgaactctgcagtcctgcatcaaggttgcactggactttgtttcccccgagaatgttggtgagtgtgttaggctgaccaaggaatttagacgacttccatcttcccacagggctaaagaagataagctagaggttagcttggtgtcagttgaaatttctggtgtttgatgtggtgactgacttgaatttgatttgtgcgttttacagatcaagaagatggctttccatgctctgaatgaagttctaaactttctggatcctccttcctcagaagggtgagcattcattccactgtaaacataacagctgtgaagtttatacgttctgaccattgtatgttgcgtgattggtggatcaggtcgaaagaagcggcggagaagcctcgaagggggcgtggtcgcccaagaaaacactagctgcaacaagtgatgacttgatttgctgcgtccggctccctctctgatcatcttttgtggtgatgagtgggctaaaatcgttcatgcattttggaggaaggggaggaatcttgtgcatgtcaaaatgtggtagcaatagcatgatcgatgtaggtaggctgctaatgctaatcagttaatggcttgatacttttccttttggcttgaacaactaactagctgtctgtctgtctgtttgacttgtgttaagtggattcagacatgtaatctggtccatggtttcagctgtagcacatgatgttccatgtctgctttttcaaggttgttgtacccccaacgaaacggatgggattgatggcccttttgttggattcagatatgggttatatacaaatactagtttccttgcagcctgaattttagaagacttttacggtacattatatttccagtataaatgagattatgctgggaatctgctgcaaaatagaaatttatcagtagttatttcgtgttatatcttcacttcgatagtaatcctaattgttcgtgcgccagattagatttaactggatacggttgaatagatggcacaatcaaatccttttcatcggattggtggattcatcaaacatataaaaacattaacccgtgttgaataactagagtgagggagattatctagcatagagaaagatcattctatcccctttaattttatactgcagtcgatttaagtggataataaaatcaatctacacatttgaattgttttgagttctcgaattttattcttcatttccatgcgtgcgatgtgatgccaacatcaacttctgggtttttggctaaaaacaattgagctgagcaaagcaagaggaagaaggaacaattgtggatgccaaataaaaggaccgcaaacatctgattaacatgagtgatgaaatacatcattatagaattcagcattattatgtataacatcattagagaatttagcagataacaatatgtcagaaccagcatcagcggcggtaatattagtatgtcaattcggaggagaattgataaggcacagcagagcacgggctcttgtacatgttgatagatgagcgccgcggtagtaaattttgtttgtttgtctccaaaatactacatatatggacatatatgcagcagtcagaactcagaatgttggtctgaaattctgaaaatacagcacatgtactcagtatatgtgctgacagatatttttattttggacacaaagacgatgatggtgatgatgataatgacaataatgcatgatcatcatcatgatgatgatcactaactactatgtactggtactcacaatcatataggtagatggatcggatggggaagcatttgtttggttgtctagggcaaactgcagacagcggtgcagcaaacaaacaaacaaaaccaaaaggccgcctaaactaaagttgtttgttcgctttcctttatggctcggttccttccttcggttgacacaccccactcacacacactgtcactcagtacagtactagtattagctagtacaattcacaggtcactgcagcaatgagcacccatgaaagatctatctttctatctgcagcaatgagctccacagaatagtactccatattacagtagtagtatatatactactacataataagaaaagagcttggaaaaaattaaaggaaaaaaaaaacaataacacctctaagggcggtgacatagcgaatggtctcgcgattctacatcagatatgtcagagttttttttttttgccgggtcggccgaaggaatcggcgaccaaatttcattaagattgggagaaataaaattaaagtacaagtagttttagcttgcaacgacaggaggctgtcgaattagaattagactggcagaaaccacagcccgacaaactaaaaaactgaaacgccaacacaacagatatgtcagagtggcctcatgggcatgtacttgtcctgaaaaaggcacgagagttattatccaaacaattatattacggcataaaatgcagagcctttgtgcgtgcggaactattatcgaaacaattatattgtgcaagcattagcttcgtcgcggttgcttattttggagctcattaaagctactactatgtattaagaagagagtattcttgactatggcttaacctagtacgtgacatactccctcacaagaccatttttggattgtaaatgccctaatgtacatcccatttcactttcactttatgtgcaaatcttttccacaattccttttccaagcccggcagaagctgctactcctgatgactgaatgaaagccaccctgcacctaaaaagctgcagagagtgtggtgctggtgcatgctctccctctgatccccacatccaatccagatcaatcctgcctaatcatcataagtatattgcttgcccacctagaatttcttcgactcaaaatataataataacttagcatttataatttatcttaaaatataacaactttttcacatgtactctcttctcaactaatcataatctttcaccatttaaattctccaacatttctcctctcaactaatagccgtgtttaaccttaaaagttcatgtatcctgactcctgagacgaatgtagttactagtgccttttattgctctctgctgtctgcctcactgccatgacaaaacctgcattcatcaatatctgaatgtcccagcagcagcaagctactactactccatatcaactgattgatccctgaagatctatgtcgctgcttacacatttttgtatcatattttagataaggaagatggattacattgccagccgcatgtgtattgtatactactagctaatagcaatctataccaaatttgtgaggtcatttacacaaataacttcaatactttgtttggcagctgagctgaattatgtctactatatgtgaaaaggaaagaaaagattggtaaatcttttttatggcaattcattcgtagtagatggcatggagatcggaatagtggatgtgcgggttaaatcttgcatatgatcagttcctgattcgctttaactatttaggatgtaaagagtacaggttgccagctttatctacagctagcctcaccactgtatatactccatccgtcccaaaatgtttgaagccgttgacttttttaaatatactggagtagtatatattgatggatgcatggttcgattacgatcgagctgcatgcgtgataaggcgtaattaaacaaatcaaattaagtaagtatatcacgtcacgagtagaatatataataccatgcttcgatcgattcggagacaatatatatcttgaaattcaccacactatcaggaagtaattgatcagtagcactcaaatacggcctgcatatgtaataatgccatctttcatatatatttttatttatagttcagtcgtctcaacttttacatcatcattttccattattgcacatgacaatacacattaattagtacatacaaaagacatgaattgtatatatatccatgctaccacatatattggagtatatatatatgtacatatataatcagaggcgcatgaacacactaattacttaggtgctggtagccggtggagcaagaagaaggtgtgctgcctgcatctgcatattaacgtaaaaactatggatgaaagaaaggagaggggaaaaaagttaaaagaagagaaacaagtaagcatgcaacgtgatcattgctgcagggaaagatcattgctgcagctcgatcgatcggcaaacatgaatgaaattattcgcagctagctcagtagctctatggctgtggttagcaatgcaaccaccagttcaccatggagtagtggagtactacctcctatcatatgcaatgcacagtgaaagcacacgcttcgctagctagctaggggcagcaagcacacgcgcagagagaaagagaaactagcacaattcaaggcaggctcgcgtcacttcatcaatctcctgcctgccttcctgccctccatatgtatatacagtagcagttatttatacttccatcttcaattttgcatctatcgaaactgcttgagcttgagatcgatttcatatgatatgatatgaactggaggttttgaccgtgctcccaacaatgagtgacactgcacgtcgatcgacattactatgatcatgtccattgatgaattgcttagtggtcgagttggcatttgcagagattcagatatccaaatatagacttgatcgatcgacgaactgagaactgacagacagtatcgatcgagcagcatatatgccaattaagatcaatccaatctgtcctggccgtttctcaatttcttgcttgctctcaacaattctgaactctcaatcagatgaggtgagcagcatgcatgcatgcagcagagacagtgtagtatgtgtactagcagcagcagcagctggacaagaaagagcctgtctgatgcctggttgctggttggatcgatcttggatggacgacgcgacaggtcagcctttctagctaggtcgacaccgatggacggatggatcgacaaaacgaaagcttagcttagcttgctccatccgtccatccatccatccttcgatctgctgctgctgctgctgttcagttcatctttttctagattctgttcatctagcagtactgaataatgcatacatatgctgccattctgcacgctcgtgcacgctatctttcttagctttcatttcccagctacatgcatgcaagcaaaagagaagagatgaacagtcaaacactggtccaccatgcaatgcagctcacagatcaaagttcaaacaatactactgtaaaaaaggcttgctatcaccggccgcctatcagaattaattaggattcaccatgcattcagtttcttaatttctcatgtactaggtaatactatgtaagtatgtagtggtagactttaacttctttttatatatataaaggggctaataattaaaacccaagcctttaacttaattcaccagttatattgatgtacagagattgccttttcttcttaatttggtgaaacatatatatcttgccttgaattgtaccagtactgaatttgatggctaactctgcatatatatatatatatacatataatatactgccaaagtaaaccatttccattatctaaatataatatataatgcaacagtaccatttgttcacaacgcaactgggaacaataatactagcggtctagcacaccatgcataatccattcatatgaaaactactgctgcgtacaactttcaaataaaaatatatggtataaagtataaacagtaaaaaaacgccacttactttttttgatctttatatagcgaacgtacaaacagttttgggaaaaccgatcacaacacatataatctatctactactggaaaaaaggatctaagatcaaaacatagatgaattcagaagaaaaccaaataggaacatataaaccaaggaaattaggtaaattagactcagggaataatttcaaaattatatatatatgtgagagacctaccgggtcaatgaagcacgaactatattgcagtatatatgtacaagaccataaagcaaaaaaaaaaaatggagtagatataacagttagctatacatatataatatgactcatgaatagaataccaagtgcaaatgataagatcagattagcatatggagatctgcatgcatgcatggagtactatcatatcgattgttatccaaaaattgagtactaaccatacattaaaaagggtgcataaacttgcagatctgatcaaattaaagagtactgaaattagcctggccgatcgaattatttcaagatatcttttattgcagatagaatattccaattagcagaaagaataattcaataaaaatccaagcagtaattttacctgctagatcgaattgcacgcagatggcggccgggtgagcagtatctgatatgcatggatcgatgtacagatcaattaatctccatcgcgatcgatccaagaattagagcaggcaggagatatagctaggtagatatataagtaagatataattaagatcgagggcaccatgttttccaaggactttcttgaactatcaacaagatggggatccagatgcgcatcgatgacctaattcagatcagatcgatcgatatgcatcatgcatgggatctagaacaatatatgaggagcatgcacacacgagttcacagttcaagaaagcctgtggagagcatggccgcaatctttcttttttgctcgcaatttaatttgtgtgtgtgtgagagagagagagacgatgcgaagaagaggagaaagaggggtggtatatatagagccagaggaagctgatcaatcgatcgatgcactgaagaaagagatggtggacagacgtaattggacccatatacttttgatcgatccgtacgtacatacatattcttttagaaaaaaaatactactaatatacatgatcaattaatcatgatatataaatcagattttaatttctggattatttatacgacgtctattccatctatggtacgtacagaatattaattatgttgtgatcgatttctgaattctgatcgccgatcgagccggtaacatatatatatatatatatatatatatatatatatatatatatatatatatatatatatatatatatatatatatatatatatatataattcatcttggaaattaatggcaaattgcgtgctagctgtatataagtacggccatcgtggggtgatgatcgactcaattaatttgcatattgtaattagctagctactggatgctaaacaataaatttggtatggaccaattaattaaccactggtaacataaataaaaattcaccgtgtatataggaatcaaatcctggtgtacccacatatatgaattttcaataaaactttagtaagatcatgaatatgtcactggttctcttggaacatgcatgtgtggcgcctgcgatgtaataaaaaaatcaccatgtttaattgctggagcaaattaaagcaaattaaacgatggaccaaccgtaccaaccggtcggatcgatcgaggggtagccggcttagtgatatctatcgatgatggatggatcgatcaagagtactatcaagagctgcatgtacctatatagctttaacttattgacacttttcacgtgtgtatatcaccaaccaaccaggctgaggcaggcaggattcgagacatgcgtgtactatcatatttatgcatccaccgatatatcgatcgatcgattaccgtggagccctcaaaaattaatttattatgtattgatagacatcaatcggttttattctaattacatatctctgttgagtgattaagcatctacagtgtttgcattagctaagcttgctagctagtagcttagttagtgtctatctgaatggctatgcatgtaggaatgatcatacatcttacctacttactactatgggcctgttcggctggccgatacagctacttcagctgcagacacaacacaatactatttatgttggctgcacaacagtgaaattaagtgcagccgaacagagccatataatatatgatatggatcaatgtcccaatcgtcgccactatcatattcttacctacttaatagaagtgaaccacacgtatatgtgcatatctacacctacacattattaacagagtttgaatatgagatgtcatgtttatattaaaaaaaaggcacatggtctatattaaaaactacaattttttaatgaaaatagaagcgaagaattatatatcaaactcaattcttaaaatgtaggctatttaagttaaatagtgcgctaagactacctcacaaaataacctcccccctctctctctctctctctctccgctctcctccccctcccctcctctcctggtgtgaaaaaaaaaactctcctctttaaccaaacattggtctatcgatcgctaggctcccctccgtctcctactccctctcctttctgtgccctcagtcctcatccactccccctctctctctctctctctctccttctgctgtaaaagaattaatattttcattatttgaatgaaattcacttattattaagaaaaagattaatctgatcaaaataatttaatgttgagaggggtaacgataatttttttcataaggagggaaaggagagcctacatgaccaactttcaaaagtaaattaccaggataaattttctacatagagaggtggaagagcaatttattttttttctgagagagatagaaccaatttctggctaaacatattaccaaaataaatttattatgccctatatgcttggagggttgagagttcttttacgagaggagaagagggggggggggggggttgctagaaggagtgagatttgggatgggtgaagagactagagaaataactactccctttgttccctcctagtacaacattggcttattttggaacggaaggagtagtgtttgggttgttcgggtaaatgcaagagaattttttatattattaggagggaagtgggagagtggatgaaaggggacagttgctgtgtgagacgcattgtttatcactacataaaaattgcaattggatcttgaaaaacaggagctaagatttgcaccatcaattaatttgcaacatcaattaatccaacatttctacttttaagatttagtgtagcacaaaatacaaatacaattgtattgatatattccaaaatcatactagtagctaagagttataccaaaaacttttttttctaacattatgttaaattgtgcataaaaatccgttagcatatataacacaactattaataccatgtgcctaattagtttagaacctagatatactattgggatcaattagtagcctaaacttcgggcactaaaaacaaatggcatgtgtaagtatccccctgatattttgtaggtgggtcgcctggccagctaaattaaccttgtctttttccgctttacactagtggactcgtccatattgtttccttaataattcgctgctttaattatttccagatcaccaacggatgatagatcagtgctacctaagcatagtacacagcacatttgtattgttgccccgtgcggccagctcaccatccaaccatggcaatgcatgtgttagttagctccatgtgaatgtgatccatccatccattcaatcccatatatgaatctcatcatcaaatcattaattcccagattattgtgattggaccatctagctaccaaaaaacacacgatcgatcgatgatgcgtgagttaatatcacaatgaaattaactgcatccaaagagatcaatcaagcatgttacagtccaaataatgctgatgctgcaaaacaacaaacatacatatattatatgttttgtcactcgatatgtgctactcgtaatacagatacggttacatgtaatttcactggatggagcaaaacaaacgcacactggttagtatgacaagcaaacatgaagcatctcgattgttcttcagtttcagctgcagccagcttcgaggctagaggatacatactagtaagtaactgaggcttcaatcccctttattcattgaacgctgacttgtagtgagactcgtcgattgttgagtatatgtgcccaatgtcagcgaggtaatcaatagctaccctgcataaattaacagagagcgaggtaagcatcaaccagcagccataatttttcgtcgaattaatgtctcgctgttgcgtgtgtgtgtgtgagcgaaggagtgaaatacagacttgatcttggcctccggtagcctgaagcgcttcacgatttcatcaatgtgcacaccatgctcgctctcgctgtcagtttattcgttggtcaaacaagatgagcaaaacagcagtcaccagatcctcaaatcttaatacaatcggtaggccgcttcttcagccaacacgacaatattaacagacaaatactctccatttctcctagctagcaatcctagccaattctacttgtgtttaattggaaaatctaggaaaagtagatattgatggagcatcaggttttcacgggagctggtatttctaagcagataaaaaaaggcaaaagaaacagagacatgcattcggaattcattcctgagtaattgactttaagtctttaacaggacaagcatttctttttcctagatgacaaggaagacggatgtgcaacttacacgtttgctggttcgcggaaaacattcagcacttctgtgttcaaatcagtttttgatccatttgttacactgagcactggtgcctgtaaggatgagggaataaatcacggcagcacaggagtttgattgtttgatcaatgcaataactgtaaatacaacttaccgggttggatttcacagaggtcggagtggtcatttcactgaagccattggaagatgaggatcccatggcagaatatgtttttgcagggctaccaatctacagtgttgaaggtaagcattagttctttttttgttcaaactcatgaaccttctaactaatgaacacgagattgctatcacgagagtatttgtatagaacaattgtacatcacagcagcatacctgtgatttggtgttctctaaatgcattcgcacgcactgaatgaaatgcagtgtgacctcattataatcagttacaggcctgaaatgaacaaaataagagaaaattagttgcatgtcttattgcatatttgcaccagcagaatatatgaatgttacgtacctgatagcgaaagcagtagcacgcttcctctcctgaagccccttgaggctaccaatgacagaaacatacattccattcctttaattaggaaaaaaaatagagttatgagaaaaggtgatgatcctcaaggagaaagatgctaacaatcctcaaaaataaaagatgatgaagtgcatatatagaagcataaatgggagctatgactggtacgtactgaacagcagcggtttcagcagaatcagcaccatcattgaccctgtaaaatggatggagataaataaccatgtaaatctgctgaagccattggcaaaagaacaacaggatgttgtagtaattaacctaatttcagaactaaagatgtaggagtactacttatatcattgccttgaatacgaaaagacagaccagatatgtgctgatgctcaaccaatgcttctagaaaccaaaagacaccgtttgtagtagaatgtttatactagtagtaattagcattcaggattgaaaaaacattttccgaattcccggccttgaattgtttggaagtctagaacgagcaagctgaactacaagtagtagtaaacaaccagtgatggcagttgaagcagaaatagtattgactaggaagatacagaagcgattgaatcggcgaaatgggctcaccatctgatgaaatcgaggcggccggtgccatcgtcgatcgtgaaggacacatcggtgttccgctccgtcttgccactgaccaatcccacaagcctaacctgaaaaagcaacaaggaaacacccaaatcaacaagctaagaggaaattaaagcagggagggggggggcattttccgtgttgtgttgcagcatacgttggctgtctcgacgccgtcgacgacgaagggagcgcccttctccccggtgatgccagattgctgcgcttcagagatctgcttcacggtgagcggcatggtgctcgatgcgccccggctctacaaaatcaaaagaaaagaaagatgattttatcccccttgtttctcgaaaccaagacacacacggatgagaatggaatggagattactaccttggaaggggtggtagagtcggcggcggcattctgggaggaggtgaactgcgacggcgagaaggcgtcgggctggctgaaggacatcatgcttactctctctctctctctgaatctttctttcactctcctctcgcgtctcgcggtggtggcggcggcggcggcggcggcggggttgatgggatttggagttagatcgagtagactaaaaagcccaggaagagcaagcgcgcgggagattggggaaaccaagaggcgggaggttgtggaacgcgcgggaaatggctccattcattcccgccatttctctcctgacctttcgcgttgctgacacgtggggcccgccagtcagtcagtgtgcccaaacccgtttcatctgggaccttcttctcgacgggcacagactgataagtgataaccagttctcaaaaaaagactgataaccaaagtcgagcgatgattcgatggaattcgataggttttgatggaatttctttgaattttgtcggtaaccgatcagttttacaaaaagaaacgaaattcagcatgcctgcacttgctcccttaattttgtttaggaaaaaaaacaaacgaaatcatgtcttctgctaatctgctatctattgatgaatgaatggtgcaatctttgatccaattccaagaggagagatgaacgcaactccaaatttcccattcacacaaattaaatcatgtgcgtggatggttgcacaaaaaggatatgctacatcatgtcaatcgtatgaaatagaaaaagggaggagagacagccgccaaaagccaagccattctttgattcctctgcaacattagatacatgggaatggaatatacacttgtcggcaaaaataaagttaaaaaaaatcaaaacaaaacgacctctgctactagctgcggatgatcagattcagacagatggatcgtccaaatactccagtcagatcagattcttcatgcatcaactcttcaagggttgaaatagcctgaaccaccaaggttggatgagaccagcaccatcacacttgttatggcagcaagccacactagagcagtatctgaatcacaaacaaaatcagaaaatcaatcaaggtgatgtagtaatggaaatctaaacacaagccaaccaacaatactatgcaggtaaccagcatagtgaattcaacagttggttacctgtggagctattggatacagtccctgtatcagcagctgctgcagcattttcaccatctctggatttagcagcctgctcactatctctcaagcttccgggttcagacgacgacacaatgccttgaaattcctcgctgacaagcagcgcggccagcagatccatgaaggtctctctctctttaccatccatgtcactttgcttacttgtactgtcttggacataatctagcacatcctcgtctgaaacatagcccgcagcaaactcattttttaccccttcatcttcctcgtcctcgacatatgctttgtatgtgaggcgaaggagtacttccccttttgaccgtttcccaagtaagccccatcctccatataaagttacaattttgtctgtaggtactgtgtctttaagtgatcctaactcaacctggcaaatagaatatactcagaaacacgttccacttcaacaaaggacacccaaaaatacaaacaaaatacacttcactcatcactgatatagtatgtttgcttgacctagcaaactgctgtaaaacagtacactaaactacaaatttccaagtaatatcacatacatcagcttagagaggatactaaggaaaactttcaattgaaacaaactttgcaaaagatgaaaccctacctctccagtgccaatagtgacatcggttagaccaactgaatcctttacttgaatgcacaacttctgtttgcgagggtttgcaactagcatatgaaagtcctgtttgatgtcaagtgcttatgagcatgatagtatacaagaaaaaggttccatcaaaatgcccatgagcttaaagtataactgtctcagagctttacttgattccagattggttcgcctggttgcccaattacagttgtttgactattcttcttgctctttatttcttgatcaccaagaatcatgacaacatatggatcagtcttccctgcaagtgacaaaaaaaattatacctaaatattctatcaaagtgacacagatgtctgtaaggataggcgaactaattttttatttcatctccagcttgcccaagtggtaaaattatttaatgatttgatttgttttttctgagcagataaactcaatagaagctaaatatttatgatattcttctaacaagatgctgggtgcaatttccaaactaataaacatacgctaaatatttccatttggaaaccaaagagttcttttttaccgaataagacaaagctaagcttcctggcatcaactaatgtcactgatagttctccaacgaagtccttattcccatcttgaattacatcacttgcaacatcttgaagtatgccacttgcaacattttggattacgtcacttgcaacatctcctgcaacaggtcccatagatcttccctgctgaaaatcaaggacaatcttcttgggccgcacaaagagacgtggcaaatcttctgttagaagtttcgtgagaaacctagaggaggtagagtcacaggtgacttattagaaccaccggccaaagggtgaacaaggtttgtctattaaagagcagcattaaatgaaaagctaagccttaaggtgttgaattaggatacagttgcagaatttttccgaaaacatgatacaaacaataacaatgcaggcacctgcattttatatagattgttaaatatggttgctactaattcaacagaatcttcatggatctaccaacatgtatttaataaagagtctaggctaagtaagaagcaaaaactaatattgatagcttaaacaagtaatagcatatgttttatcaccagctaagcacatggggataagaatatttaaccacctagaactagagtgaacaagaaagcaagagaagaaggcggcagagagggtaaaggtgacagtgggaaggtaggttaggccattacaaaaagaaactaagaaagcaactttaaaatgcattagtagtccctgctcattgagcaatatctatgtagtagcatctaaccatgattctgcgtagatgtttgagatgatagtacttacattgacagaacaggaattgctggtgaagacaagcaccatatccatgcaaaaaattgaaaataccaatataccattagcaaaggctcaaacttataacatacaaatttatataacggaaacagaaaataaatgaaataaaaggctgacaactacccaacatgaacaaacgaataggaaacaaagcacaaatacacaacatatccagtttcagaacattaaacagattgacaccattgtgcatacataaactaagaaattgtaggcttgaaaaactaaagtcctacgatcgtaattttttttctcccatttcttccaattcatttgtaagaagacattcatggttacaaacttacaattccaagatatcagtcagaaaacccctggatctttgggacacgaaatatcagaaatgcaatatataaagggggtactagagtaataatggactgcggtaattggcaagtatatactatagtacaagtgtgttacaaatactgttaaaacattaaccgtaccaattggaacgcggtatactctagatatgtgcagaaatgggctatttgcaatgctgtgttacatgattcacagggcatattgtcagttggtgctgcatgtttgtttccagaaaatcatatgagttaaaaggtgccaaccatgctttcttttggaatcacgagaaaatcaaccttacaaaggcatgaaatttaagtacaggttgcataggaaataataagattggacaagcaagtcatacccataagattgaaaagccggaacagagacagctcaaatttaatctttgggagcgatacaaatgcccaagatacagctcccacccaaggttctgtcggtataagccttagtttaacccacaattccccatcgatatcgaaatctcgaacccagactggcacaacgacaggtacggcactaaactttaaggagagggccaatgccatgcgtgcaccaccagtataacggaggccaatttggtacctgaaatacaggatgagttactcgctgccttttgctggccaacactaaaacatgatatagatacaataacaatgtagacagcagtgttgccgtttgctttttaaaaaaaatcagggcatcaacaatgaccaagaaagtagaaatcagaaactagaatgaacatatttatacggtaacagatacatgcccacccatagactgtagtaataagaagtgaactgctggaatagtcatcctagtattttgtttcatggtggtgctaatcctatgatagatacccaaaaaagagtaatactccattttggtatgtgaattacaggcaaatggcgacaaatattcctaagaccaatgtcatcatgctttgctttccaatttcctcacatgagcagtgcaatggtagtggggttaccataccgattaccaatgtgttatgtgcttctcaagcactagtagtagtactagctagaacaacgtttgggacaagcaatgtgaagaatatttccatgtttcttgctgcaacggtagctcccaaccgaattgggtatggaaaagaaagaagagagtagtagaagaagtgaggacgtactggaggtcgttggcccggcgtgaggtgcggcgctcgacgttcctaacggagaggggctcctcgccgaggtagaactgcctgatctcgacgcggttgacgtaatcgggcttgtggaggttgtcgatgacgggctggagcaagccgacgatccagttctcgatgccagggcggtagaccttccagagcttgccgagcaccatgttgacccactcgacggactccttgcgctgcaggtccttctcctcgaggaagagggagaagctggaggtgggcacctgcggccacgtgccgttgaccttgacctcgcgctcggcgcggcggcgcttgcgcagggtccagagcttgtcgaaggcggcgccgacgaagaagaagagggcgaaaaggccgaggacggagcggttgacgggcggcgccgggagcgggtggatgacgcccagctgggtccggagcttggagacgagggggtcctctcccccggcgccgcggaaggttccggaagcgaaggtggtggaggaggtggaggtggaggtggtctccgagacgccgggggtgtggagcgggaggttgttggcggagaggggggccgggcgcctgggcggaaaggcggcggtggcggtggctttgggggtgggccatcggcggcggcggatagggaggagggaggggaggaagcaggaagaggtgctagcggcggcgagggagggcggcggcagcggagtgccggcggaggggggaagcatcggggtccaccgacatccggcggaggcagcgaggattgcgtctcgtctcgtcgtcggaagcagaattcaagttgaaattgagcagagcagcaggtctcctcgtgtagctagctgcagctgcgatgcgacggagggggagggggaaggggaagggaggggcagtcgatcagctcaccgtcaccggccaccacagccgtgcgtcgccgcgtgtcgtggcgactcccaccccaccagtttcctcccttgccattccatccgcgtctcgcgctgtttctctctctctctctcttttcttcttccgataaaatgagcgaattttttgtgtgtaggtatatttttctggaaaaaaaagttcgatgaatcgagtttgagtatcacatttacgacgtctcacaacttaaatcgagtgtaaatctaatccctcgtcaaatttaactcgagtggtctattttcctcccctcctctctccccatctctctcaatcatttttctctcaacaaatatccaagacacgactaagcacatgaggtgttggagcgccatcagcacctagagctcctgtcagagcttctacgactcctattcggcgatggttagcccgaggtgccccccgtttcctgtgaaagctccccaatccctgaccccacggtagctgcaaaagggaggagcaacatccttctactctagccgtgatggcctgtcactccaacagcaactcaaggacggtgaggcagatgaggaggctgtggtggcaaatgagtgggcagctctgtcgaatcaggcctaattgcctgccacatgagcagcgcgagcagcgcaggtaaatccggatgatttgctttgctcgtcgcggtttatatccaagcctgagtgggcaagtgccttcccttgccatggacacattgtcgtcaagcatctatgattgttccttcaagatccagctaatcgtctcatcaggggctcaatcgtcgacatgagtggcttactcgctagcttcgtctccacctctcaccttgacgatgggaatcacgcctaccatagttgcatagggctttacccgtccatgctacatcttgctaatttgtgtatcattcctatgttgttccgatcaggaaacacactggtaattaattatttatttattgtctctgttaggtacttaggtattgtattaatttgatgcctagccgtgctcaacctccacctctcttaatgaggcgccaccgcttgcgctgctgggtgacaccatcagtcgtctctatcgtgaccgcaattgtgttgagggggaagagagagagataaggaagagaggaaagagagaggcgtccctgacgtgtggacctatgtaggtcacacgctgactcacgccatgtcagttgaaaatagatgtaatacactaatatttaccttggtattacaagttgagagataggttatattcgatattacggttcaaatacagtacgtgaaatgaacttatttcctattttccgttgggagaataggcccatcagcctagtccacaaaaatgagacccgatgcaataggcgaattttttttatttataatttttttattaaaagttttacaaaaataattttccattttgaaaattgacggaagtagtcgcctaccgccctctgggcgtgattcactgcaatatatgtgaactcaatgagatacattattcattagatgtgacaagacgatcacgcgtgggcgtgattcactttatgtcaacaggcagcgccgaaagttgatagtgacaactcgagctgccgcttttcatgtgtgctgttgtggactgtgcgcgctactggatctgacactaccgtgaagcgccgaaagtgtgttgtcgtgagcataagttgttctagcaccatatgaatgaaaagaactatctagacgagacaaacacaagtagtactgcagtagtaatagcaaaagtagtactgctttacaagtttgtaagccaaaagaaacggtcacataaggactgaagaggtagaacactactgacgaggcctcttacccctgtccctcctaccctgcgccctaatgtgcccctgggagtatgtgagtcagtccgggggtacggcacggccaacccgtcctgcctgtacaggtgtgacctctggctgctcctgagtgtgcgcctctggagctcctccaagctgagaggagcctagtacgtcgtggtggtgtgcaccgtgcaagtcgtcgtcgtagaactggctagtaggaccagtcctaccggcgtgagacgaagaggccccagtaccgaagaccccggctgcaaatcctgctggacaaggaccatcagtttcatacaggtatttaatagtattaataaaaagtaaagtaccgtgtgggcgagggatcgacgctccgtgagaggaagagctggcgaacgcgcccgaagaggtggcgaacgcccctgcggagctcgcggaagcgccggtcgtgcctgcgaacgcgctcgaaggcagacgaggtcctgcgatgaggaaacgtgccgttaaaacatggtgacatattcgtgcaaaagctgaaacaaaaatgaactaatctctgggctgaactgtaccgtgcgaaaccggtgctgtaggtcgcactgctccaaagctaggggcgctcgaaggcaaacgaggtcctgcgaggatggaacatcaagttacgacggggtgatgttttcgtacaaaaacagaaacaaaacttaagaaacctctgggctgagcagtaccgtgcgaaacaggtaccgtaggtcgaggtcctgctccgacggtaggcgcgcgaggccgtggttgtaccggaccagctggaggtacgacgtccacggcgctgcgacaggagaagacgcgcatgaccgcacgcatcttctcctgcatccggtcgaaggtcaccctctgctcaacgtcagtcaagtgcaaacctctgttcaacctcacttggactgcggtgatatcggcactgatatcctgtgcggcatcagcctatgcaagatggaaataaaaaattcagtagttgtcctatattatgcaagataaatgaaataattgtaagaactaatacaaattcgatgtacccccacgaagtagtctcggtcacggtgcgtgggatacgcgtccgtcacagcggcaacgtgcggctctggggcgtctggagtgaaggtcacacgcgcacgagtgcgaggaaggtaccagcgaaggtagtcacggtagttctcctccgtgtgtgggaagagctcgttgatcacctcctctgtagctaacacccagtcgtcaacgtactgctgtacacgtggagcccaaagtgcgcctgctagctgtccccgtcgagtcaacctgtgaagagaggtaaattatatggctcgatgaagtaattatcataaaaatttagaaatgaacaatccgaactcacgagtggtcggcagggaggacggtcggctgcacgttgcccggaaacacctgcctaagtccgaactgtctcatcacacgctgcgggcagtgaggctcaacgaaaatgtcgaacaccatcggcaggatggtgagccaataagcccggtcgcgtgtgcacaacgacgaaagtcctagcggtgctctcgcagcgacggcctcttctgtgtacggctcccagatgacgtcgctcggctggagacggtcaaactcgaacacgaagtccgggtaacctcgtctcacctggacgtgagcgtaacgacgctgcaataaacatgatcggaattagacatgttatgtgaagaaaaaaaagaagacgactgataaacttataacgcagcgaagttgcactaaccccacgtcgacaccagtaagtccccatcgtgggaccgtcctctggccactgcgcgctgcgaccaaccccgtagggtgcgctgtccaccactggtcgacctatggcaaacctctcggctgcccaaagctgaagcaacatagggcagccagcgatgatcgctcccgcgtcagtcttcgtgcacgcctcacagagggcacggtacgtggctgctagcacggcagaaccccagctccactgcggcacgtcctgtggctaagcatccgcaatggaccgtgcgtagtggaccagccggaagtccacagcgtgcccgtgggtgctagtgaacatcacccacccgaacaaccacattaggtacgcctcaagggagcgtcggaccgagtaatcatcagcgtcagggtgcagaaggtccgcctacaattaagaatgaaattttagtacaaaacactcatccggtcgcaaataagcatgtatgataataacaacttatttacttacagtgaactggagcaaccaagccttgctaggcccgactgtagagtacggaggaagggtgttggccggtcctaggtgtggaaggcgcatcacctgctcgaagcgcgcagtgatatcctccttccacccaaaaacaccgtccacgggaccaactggtgctcccgccagcggtagcccgagcaggtacgacacgtcctgcagtgtcagagccatctccccacagggaaggtggaacgtgtgcgtctcaggtctccagcggtctacaagagcggcaaggagtgaccggtctgcatcccaccgcttcgctgggtcacggtcgtccgccgccgcctcaacaagcctacaaagtggtagaaggcctgccgcacgcaacctgtatagagcaaacttcaaacataactacgacacaaagcaaagttgagttgaaatgtgaacatacgcgtaccaaggaacgtgacgggggtcgacacgcaaccactcgcgcgacgtgcgtggacggaaggtgccgagctgtgcaccctcgactgctgacaggaacgagcggtggttcctgtcaatcccacggttcaacagcgccggtgtgtcgtacgccatacctgcattaaataggttgatcagaaacatataaataattagttcaacataagtaataaatgttcataagcgaattactaacacatattaaacaagagtacaaacaaacaaaagtgtttagtccgaacactcatcacgataacattatgatacaacaccgaatagttcgcaatactactagtacaacaatagtcggaggtactcattacaacaacattgaattgaaattacacgatagaagtatttagtccgaacactcattacatcacaacagcattttatttcctaaatcgaaagcattgttacaccatggaatcgcctgctgcgcgacgacgccttggccttgcgcgcctgcttgttgttccttcaccaggtggtcgcctaccatcacttgcctgtccagatggactagcatctgcgccgcttggaacttctgcattcttcgggcatttcttgtaagtatggccgcgcagatcacacttgctgcagcgtaaagtcctcccacctgcttctgactcatccatatcatttctgatgcgtctagtttggcgtcgaccctttttcacccttaacttagatggatctggaatataaaaaacttgggcactcagcgttgtgtaagatcctgagatcccgaacccatatatctcctcactccatgtatgaaagattgcttctttcctgaaataatttgagacgtacacattgggagatatgccacaatcaccggcagcagcaagaacgtgtgagcaaggaaggtgatgaagcttcggcttcatacaactgcaggtacatccaccatccgccttcaagacacattcctgcacggcttgcttgcgatagataccacgcctgctcctatcaacacacattatttcataccgatgcacttgtgtgccttgagcaacaactcgatgtctccgtgcctttttgattttatcttccatgtactttgtcactacgttgccaaacactatgttgttatcggccatggacggaccaattttcttgtatcgatccctaaagtacgcttgcgtgccgtgaaggatgaattcaacaatagcaaccaatggaagtacccgaactcctcgcattacccagttgtacacctctgccaaattggttgtcattatgccataccgagatccatcggtgtcgaacaatagagaccacttctccttaggctcattctcaatccactgagtgaaatttctgatggacgaccctgacctccttctcattgttggtgggtcatcatgtaatgcaccaagaggtatgggaggctcgtcaccttcaactagtggtctgcgagattgctcatctgtttgcttcgttgtcaactcatccaacttgtcccacaactcattaaatttcttctcttggttctgtgcacagagcctcttaaagagctctataagatgcttgttcttgaattgcttgtagaaatttgcacccatgtgacgcatgcaccaccgactccgaacatcaagccacttagctggaagtcccttctcatcccaaccgttctgcaagtagtcaatagcccgcaacatacccgcatgacgatcatgtataaggcaaacgttgggcctcatacgcaccactgcaatgtgcactctctctaggaaccagtaccagctttcagtgttctcactctctacaaatgcaaaagccataggtagaacctggttgttcccatcacacccaattgctgtcaatatctgacctcggtatttacctgtcataaaagttccatctatgcatagaacaggtcgacaatgcacaaaagcattgatgcaagcacccaatgagaaaaaggctctttgcagcatactctttgttcgatcatcaaccgatgtaaatgtatgtaggtcatagtacgtattattattcctctgggcaatggtggctaacaaacgaggcaaattatcataagaagcttcaaatgtgccatacctcatctcaatgatcttttgtttggctctccaggcctttgcatagcttatggtgtacttgaatttgttctcgatgtgcctaataattgattttggttcaaagccaatgttaccaacaacactgctgtacatctcacttgccacaaaagctgaagtgatgtttcggtgatacttctccaccccttgtaagtagcacttgtgctcggtcacaatgctaactttccaataatcattccatttacccttcatgcacctcacttcatacacataatttgttgacttgaccaccctaaactctctctgcaaggaaactacccaatgcttcactgcctccttcatctcatccttatgagcataccttgcaccctcaattacctcgttctccttatactcccagggtacatgatcaccctctgatataacaagtccagagaagtcctcatttgcccaatcagtggccattacatcaccttcctcatcggatgatgcgtcgtcgtccgcttcctcattatccgaatcttccctctccatttcatcaacaattataccgactctctccccctcatccgccatgcccatagcctgctcctcccttggttgattttcctcattttgcatcgatggtccaacaacatcccctgcattgataggaccctctacatcttcggtttgcattgaaacatttatatctttctcttgtaccgacacaaatataacgaggggccatgaccgttcaaaagccatttccacataccgtctccaagcatcagtgctgtccatcggcattacttcccaaaaataaccttctgttgcacgactcactacaactgacactgacattgtgtagacttcttggtctattctaaatcctctcaacaaccaactataaattgactgaaatgttctctccgcaggcctatcgatgcccttagatgtcattacaaaatctgacagatcaacaccatctggaccaaatctaatatttccttcaccgtgaactatctgaaatgtgaccttacttgacattgtgcctgatgaaaacaataactgcgttaacctcgcatttctgtactacgccctaagttacattctctacaatattgttctctaaatttctaaaattacgttacattctccagatcaaactaaactacatcttacaattaacactattgtctatgtctcaattcatactattatattctatgctctggatctacacatatgtgctgtgtgctacagatgtgctaaaatatatggaactaaaactaaaacgcaacatatatactcaaacataacatattagtacaaatgcaaaagatgtatgggagcatacctgtgatgaattgagcgaaccagcagggcttcggcgctccccttctgctgccctcccctctctctctttcgttttttttggatttttagtgaatataatgaaatttcacagaggaaggactgggctttataggggggaggcaaaaatcgccctcccccagggcggcaagggggccgcctgcaaaattccatgccctccctcgccgcccatttgcaggcggccccccccacagtacaaaatcgccctagcggagggcggcaagggggccgcctgcaaaattccatgccccccctcgccgcccatttgcaggcggccccccgcacagtataaaatcgccctagcggagggcggcaagggggccgcctgcaaatttcgttgacggccgtcgcccgagagcgaacggccgtctgccacgtcattttcgccgccctctgagagggcgccctcccagagggcggtaggggactacttccgtcaattttcaaaatggaaaattattttttaaaacttttaataaaaaaaattataaataaaaaaaattctgcaataggcggcggaaccaccaacacgtacgtctccttccccctaccccaccatccgatctgacactgacacccggacacaccacacgacccgacccgacccgaccacacaccgcatcactcctctcctcccctcccctcgccggcgccagcgatggaccggccgccgccgcctcccgcctccctctcgcctcaggagtgggagcagctcatcgacgatttccccaccccgcgccgccaccgatggctccacctccccctcctcgacctcgccctctcctccctcccgcgccgcgacctcccctcccacctcaggcccctcctcctctccttcctcgacgaccacctcctcccgccctcccccacccacctccccctccttctctcctccctcctctccttcccctccgaccacccgctccgggaccacctcctcctcaccgtcacatccgccttcgcctccgcgctctcccttcccgtctccaccgaccacgccgaccccctctccgccctcgtcaacgccctgctcgcctccgccaaccgccccaaccacgcacccgaccgcgccgcccgcgccctcgcctgcgacgccctgcgcgccctcgacgccgcgctcccgggcctcctcgccgacgtcctcggccacgtctacgctctcgccgccgccgagcgctcgccggccgcgcagtcctacctcctcctcctcgcctccgccgcccgccacgtcgtccgcctcggcaggctcccctccaccacctccatcttggcggtgtccggcccgcccacccccttctttgtgcccgcgcatctcctcgcacccgcaccagatcctgccaaccccgtgccgccgccttccgaggtgaatttgagggacataaggaaagtgctcgctctgatcatggacaggccgcaggtcctcacgcctgcatcgggcatggagatggcggccatccttgcagaggtgtccgcggctgtggtcgggtgggctccggcgatcgcagcgcacgtcaaggtgcagtttggcgggatggcacattcgtccagcctcatgcttctacactctctgctcacgctgttcatccagtttccagatgctttcggggccgaagacgagcgtaaaatggcacgccgtctagctttggctgcttgtgaggcacaccgcccgctcacagcgcgcttgctggcattacattggctgcttggatctggaaaattcagatatgcggtgcccggcctcgcgaaatggttttatcctggcgtgttcgacccccttgcagtcaaggccaagaagctagattgcctagctcttgttgctgctggcgttgatgctgacaagattgaaggaggcagagatgtggaccagacaattgggcttgtcgatgatggcctggcttgtgtttcagccttcaggtggctcccgggatggagtaccgagacttgtgtggcgttccgggcgctgcatgtggtcttggttgctgctgcccctcacagtactgatggctcaggttgctccggagctggtgagctcctgaattctactatcttccaccatttacaggtagaaatctactgaaaggaaaattaatgatagccgcatccatcaacttggaagaaccctaattatgttccagacagtgaattgaaaatttagcaattctcaaatttctaggtcactctgtgtgcaggctatgttggttgatatgacatcagaacatcgaggcttagtcccagtaattgctgatttcatcaaccgtcttctagcatgcaacactcatcggtgggcaggggagcagttgctgcaaacgcttgacgagaatctgcttccgaggcttgaaccaggctaccaactggcgtcatactacccactctttgagaagatcgcagagaatgagacagttcctcagctccgcctaatagagttgctcaccaagcagatggcttctcttgccaagaagcatgatccagagacagaactgaaaacatggtctcagggcagcaaggtcgttggcatttgtcgtgtcatgatgaagcaccatcacagctctcgcatcttctttcccctctcatgcctacttgtactcactatcaagtcctacccagacctggaggtccgggaccatgcaaggtaggcattctgaatttctgatatttcttgttttgtgatagctgtttttctattatcttctcacttcttcaaatattacatccaggatttgtttgcggatgctgtcctgcattcctggaaagaagctgaggcatctcatgggaatcggagagcaacctgcaggtgttacaccatctcatccaggtcctttgtttgatgtcccatcaccacgtcctgctcaagatcttaagagcatgcctgatttggcgtcttacattcatcttgaaagagttgtgccactggtcgtgaaacagtcttgggccctcacattgcctaacttcagcattcagagcagagcatctggccaaattctaagtatacaggatgtaagctcaactcctccggagcaagaaaagacaccacaacctaccatcgagagaatcgcctacacacaagaagctcttcgtgtgatggattctaagggtgctgaaacactggaaatccttaggaggcactttgcatgcattcctgactacctccactcagttggtctcaaaataaaaataccttgcacatttaggttcgattcagagccattcaaccatgcttggggatccgattcagcagttccaggttctgaaggggttgatggtttgccggccctttatgcggcgacaattaacttttcatcaagtgcacagtttgggaaaattccctcatgtcatgtacctttccttctaggagaacctccaggttctggtatggacattatgcctttggataacggccaccggttagaatcaagttattgtgcttcagtagtgatagaattagagcctcgagaaccatcacctggtcttattgatgttgtcatcaccgccaacacagagaattgccaagtcatatctgggtccattcaacccattacagttggcattgaggacatgtttctgaaggccagtgtacctcctgatattctgaaagaggatgcagctgagtattaccaggatctgttccatgcgctatgggaggcctgcaacagttgttcgaacacaggtcgggagaccttccctttgacaggagggaaagggtcagctgcgattaatggaacacgatctgtcaaacttcttgaggtgactccaaaggttttgatcagagctattgaaagatacctggctcccttcgttgtcagcgttgctggagattcacttattaccatcctaagaggcaatgcaattattaaaaacgttgtgtgggaagaaagtgattcagctcctattgttggtgctgatgcattggttccatactcagtggacacaaacctttcgcttcagcgcattgatgaagacgaatttgaggttggcgcagagacttatgctcatctaagcaagagggatatgggcattgtgcgtgtcctaatatttctaccaccaaggtatcacctcctcttttcgatggaagtaggttatgcctccacattggtcagaataagaaccgatcattggccatgtttggcatatgtcgacgaatacttggaagcgttgctctaacagggaggatttctctggccaagagtttcagttttgtaccttatgtaacactaaagagtatacaacgggagttttgttttttttttgcccctcttttaatttttctgtaccatgaagaatgggacagcattctttttgtggaatcggtgccaggaggtgtaacttcgaggaaagggcaattttgttcattgatatcattaagaacacgtgattatattccgaaattaagttcccattgcgtaacatcgttcaattttgtttcaggccagctagtatgatgctgggcttttcttttgagttttctgtgaaggttcagttattgatagttaatgttcaattgcaacaaatgtttctggaaaacaagatgcaagaaacaaattttggagtaaattagagatgccagagtaactgcaggaaacttcatgtcatcataaacaagtattcttctgctggaaaaaaagaacattaaaggcacagattcttgtgcatcaatgacattttcgacttgatatattgcaaatgtcgtgaagcaaaaacagtaccatcatcttccaaggatatgaagtgccactctcgctgacaaaatggcaagtgcattctctcttgccccttcattccagaatcggtcgttatttatacacaatgaaggtagagagaattataatacgctcctagcttgtgtagttagctatgagggactcgattgctgaatccttagcacgtacgtctttataatggattcgatagccatgacctggaaaaggaaaaaaaaaactagcaatcagtgttcagtgacttagttatgccgttttaaaggaaacaacagaaaccaaatgctaaggcagggactttctcatttcctaagaagcgcataccaggtaaaaaccactcgaagtctaacttcaacaattttctcatgctgtccagctgcaagcccactgcaggtttgtgcaacagatggattaatcctagtcctactttcagctaatggtacaattgcacatttaccttcagttagaaaatctagggaggattctacctgattgcttgctgtacataagaaagagatctaaatcatcagattcttctgattttgcaacatgatctccagtgaaaagcgcctttactggtttgtagaataagcagactgaaccctgaaaaaaatgttccttttaatgaatgaaccctatatatgctgaagaaggttagattggttgtccaaatctcagtttatgagctttggacaatttttgacagaacatgttccttcgtctctaaggttgaggaaaatttgggacaggatatggtgataatccaatctaatctttatgcgcaaaaatagtgcacatatgacatatcttgaccctaatactctttgtctttgatgttgtatgtttaaggatgttccatccaatccagagaagccttccatactgaaagctacaagtaattgctcaaacaacttctttcattaagttgaacttacttcagtatgacctggggtatggataagttcgaaatcagctccaatgtcccatgggccatttccagtaagtttccactcaacatctgcagtaacatcctctacctgcatcagcacagtaattgcagtaaatatcaggagaagtatctgagagcaacattcactggagaaataggtaaatcagactctacactatgttcatgtcatgcaagctctgacacgatataactgtcctctctgtactgctaatcagtacttgtactgcaggttataaagtttgacagtgttgattgagtactcgatgaggatcagtcaggactcaggaataagcgatgtctttctagggtcagacagaaggatgatcatgattctttgaaatcgtttggatgagggtcttacatcgcccgaatggatgatcctctcacattttagccgctcagcccacttcctatgatccgcgacatcatccctgtaagtaactcaatagacgctcttcaatatccaaaataaaagggagtgcgttaaaaaaaggcaattaaaaaagagaactatgtgatacagctttaagtccggaaatacatgtgggtcaaaaacatgtagcgtgctccaccaagtttttcgatgttctctgccagtttcgttgtataccttgggctgtaaaatcagaaaatatcagaagacctagtgataaccacatataaactggacaataagatttgggagagatgatctccaatttgtgaggaaaaaaatgctatcacattgaccagtacgctgtgctgaaattgaatacttatcagcaggaacactagcaattaatgtatctgattacaacttgataattttttttgtctggagatggaaagatgggtacttagggacatgaacaaattcataagcttattggaattaacctgtcaactagtatgtttccatctggatgggttaaaagataagaagttgctccatatgaatcttgagaatgatagccacagaggtaaacaccctggaagttttgagcagtgcaacaaggatgagtatgaatataatttaattgagataaattgggtgaaatccggaatgaggagagcaagtgatacagggagaagatgattgtcgatggggagcgggaacatgttttgcacttgaagaatgtcctttgcaggtttctcggtgtgaatggaggaagtaggacaggagagcagagcctggacatcaatggcaggcatggttcaattttgcattgaaattcagtaaaagagaggcagagctacctgcagggccttggtcctgtgttcgtcggagatgggctgcgcggcgacggcggcttttccgtccaccctcttgaacacctcctgcaattcaaatcaccatcaccaagcaaagcagctgaagcatcaagcatatgcatatatgaaagactagttaccgaagccatccagcggcaggtctggcaatcgatgcatcggtgatctgcagcaaacaaactcaactgaagcgcatcaggaagagaaattaaatggagaccgatttcaggtgcagggctcgatcagtggctcaccgacgaagaagtcgccggggacgttctgcgggcggcggcgttggagtgccggagaggacgccgaagaggcaacagctcgtggtcgtcgcggcggcggagcagcgacggacgctgggggggcgaagcgaaggctcatcatcaacgccatggcggaacagcagcgtcagcgacagcgtgcgtgctacaactagcagcgttcgctctgcgcagggcagcagatgcacaaaacgaccctcacgactgacgtcacagcaaacgccaacatccaccaaagtcagaggatccgtttcccaacatcctgcacgtacggctcgattttttccctttttcttttctttcttttttttactgagtgcccattttaacactcgatcaataataaactactctagttctagtatgaaatgagtctgtacccattatagatatgtttttgagataagtatttgttgataactttttgtgacaagtagacaagcacgatcgcaacaactaaacgccttgcagtgatatgaaatcgccaaccacctcgatctagccaaaaggctaaatcaagatgggttttatagaaaaacagctaaatcggctagcggagccgatttagagatcaaaatcagcctctaggccgatttagatcgatatgaggataactacccgtctcgtgggcaaaacagaaggtttttaggacaaacctacaaagaggtgtcgcactcttgcagcggcggcggacggtttacggcgcaaaccgacaaagatggactaaactagggtaaaatagaaaacatagtaaaagaacgattcaagtagattgtattcagggtattacaatgaatcggccttgccccttaaatagaggttgttcttgccctctacaagcccttctccacgtccaactcgggatagaaaccaaagtaaacacgaaatatagctttcccgagcaagaaaactcgagacccgaagagagctcggactctgccggtcagaccggccacacaccgcaggtctgaccggcccattgtcggcggtctgaccagccaacacacgccggtcagaccggccctcacagaggaaaaccggcagacttccaaactttggcaagttttcttattttatccctagatgtcaaatttgggtgtaaacagtattactagactgttaaccggaccagctagtatgatgctgggtttttcttttcagttctctcaaggttcagttattgataattacgacctgtttggtgcaaatgttttcggaagataggatgcaataaatatgttctggactaaattagagatgctagatcagttactaacttcatgttgccaaaagattcagcgaagcaaccgacctccacaccaatcagttgcccggatactgatctggatgtcattttaggaaacttcgcatcgcagcgagcaattttcccctgtcaacttgggcctgccgcttactctagggcatctcaagcatgtacacctgcattttactgactacaatagaaaatttggcaggaaagaaacaagcgtcttccaaagtaacgaatcattcatacaactagtatgcaaccaagtcctggacgagataaaattttgaagcatgggaggtaccaagatttagagaagatcatagacatggtgacaaacctgtttgccatcatgggtgtaaatttttacatttcctatatcgccaatttgtacattgctccttctaagataaatagaatgccagccgcctacgctggtctttcaaaaaaaagtacatttcctcttggtcacttaattccagaattgatcgttatttatgtacactgaagtctgaaggtagagagaattataagatgcccctagcttgtgtagttatagctatgagggactcgattgctgaatccttagcgtgtacatctttataatggattcgatagccatgtcctggaaaagggaaaaaactagcaatcagtgttcagtgactcaatcatgccgttttaaagaaaacaacagaaactaaatgctaaggcagggactttctcatttcctaagaaggtatactctatccgcaatgcttgaatgagcgcataccaggtaaaaaccactcgaagtctaacttcaacaattttctcatgctgtccagttgcaagctcactgcaaatttatgcaatagatagattattaatccgatttgtaagctaattgtacaattgcacagttatgtccagttagacaaaatctagggaggattctacctggttgcctgctgtacataagaaagagatataaatcatcagattcttctgattttgcaacgtgatctccagtgaaaagcgcctttactggtttgtagaacaagcagaccgaaccctgaaaaaaaaatgctcattttaatgaatgaaccctgaaaaaaaatgctcttaatgtccaacaacagcgcacatatctttcaccctgctactctttagtgttctatgtttaagaatgtttcacccaatccagagaagccttccatactgaaggcaacaagtaattgcttaaacaacttatttcattaagttgaacttcttacttgggtatggccaggggtatggataagttcgaaatcagctccaatgttccaaggaccattgccagtaagtttccgctcaacatctacggtagcacgctctacctgcatgagcatggtaattgcagtaaagaatatcaggagaggcatctgagagcaaaactcgctggaaaaataggtaagctagactctacactagtacatgtagtgcaaactatgaataattgtcctctacgtacttcaagttatgaactataggtaaaatttgctacaaaaagatgcaatcgtttgcatgagggtcttacatcgcccgaatggataatcctctcacattttagccgctcagcccacttcctatgatctgctacatcatccctgtaagtaactcattagacgctattcaatatccaaataaaatatttaaaataaagaagcggcgcattcagaaaaacaaaaaatagataaacatgttatacaacttttagttcaaacatacctgtgggtcaaaaacatgtagcgtgctccaccaagttcttcgatgttatttgccagtttcgttgtataccttgggctagaaaatcagaaaaatatcagaagacctactgataaccacatgtaagctggacaagaagacttgctagagatgatctccaatttgtgaaaaatgctaccaatttgtgaaattgaatacttgtcagaaggaaaactatcaatgtatccgattggaacttgataagttgtttgtctggccatggcaagatgggtactagggatataaacaatttagtaagtgcattggaatctacctgtcgactagtatgtttccatctggatgggttataagataagaagttgctccaaacgagtcttcagaatgataaccacaatgataaacaccctggaaagatttgagcagtgcaggatggatgacatatataacatgagagtattaatttaattgagataaattgggtgaaatccggaatgaggagagcaagtcatacagggagaagatgagtgtcgatggggagggggaacatgttttgcacttgaagaatgtcttttgcaggtttctcggtgtgaatggaggcagtaggacaggagagcagagcctgggcatcaatggcaggcatagtttaattttgcattgaaattcagtaaaagagaggcagagctacctgcagggccttggtcctgtggtcgtcggagatgggatgcgcggccacggcggcttttccgtccaccctcttgaacacctcctgcaattcaattcaattcaaatcaccatcaccaagcaaagcagctgaagcatcaagcatattatgcatatatgaaagactagttaccggcgccatccagcggcaggtctggcagtcgatgcatcggtgatctgcagccagacagcgaattacaaattcaactgaagcagcgcataaatggcgagcgattaatgatgagtttaggtgcagggctgaccgacgaagaagtcgccggggacgttctgcgggcggcggccgctgtcgagtgccggggaggacgccgaagaggcgcggaacgaggcaacagctcgtggtgcagcggcgaagagaaggctcagcgccatggacatggatggcggtatcgtgagtccaattgagttcccaggagcatacatccaaacaatcactgacgtagtgatgtcacagcaaacacaacacatttatcgactttttctgcaagtgcccagccggtccagttacacattttcacgcttggatcaagaattaccaactggcatctactggtgcgttgcagtgcagtagaaaagtcagtttggtttgtggtttggcttggctgacccgctgcatccaccgctaggaatttggaacttcctagcaaactctttatgtccttttaataacccccacatgacatttctccttccaataggatagacccttttcatatcatcaccagattaactatcaccacacttttctaactgacctttttattagtattactacaacaaaacacgcttgatggcgatgcatgcctcatgactattctgctacagtatatgcttctcctttcttttttttttgttttaagactgatgatagtcaatcaactcagctgccactactggggtatttgttgtgcaggaaggtgagtggctgcaacctcatctctgactgaagctgcagctccgacactttcttcagcgaccgatactgcagccgtatgctttccccgctatcaaccgccttcacaagatacctgcgattcaccatttgtaattagttctaagtcgcaacaacttcacatacatcttcttccatcacccccaaaaatgccatctgtttttcaaagcgagctatccaaatggactcaccagccattcaagcactgcgatgtgatgactgcctccttcccaacaaatttatcaggcgtccttctgtttccctgcaaatgctcttaacgataagaattcatttctgccctttattatttcttagtaatgcaagagccaaaagcaactgtgctccttgtaccatgatcaggaccctctcgcccactacaaatggatactgcacacccctgggtgatgtagggttttcagcatccaacaccagctcaccattgccctgattaaaacaatgaaagtaattattcagatccatgcaccaccattgattgcttgagggtatgttcacaatcacagccacagcattacgtactctgctacctccagtgctcttcagcacatccatacgttcggtcacctctttcctgtgtttgcgaagagcagcattatgaaagagtctcctatcatcttccatcttcaccactgtagctactgctcttaaagctattatatccaaaatactaacagcagtacgtgagcaggtgagacatagataatgccagtttcgtggaagaaaattagtagtcagaaatataccgagattaggaaacagggtggccggatcaacttctccattgcaaatggtgcatcttgcctaatcatagtaaaaatagaaaaactggcatgattgttggtgtcaccccactggatcagaagataagtaaaatagaaatgacttgaaaatacacttttattaaatatatgtcgcatagttattgtagaaacataatctattgttttatgatatatgctgtgtgaaatacaaggaactgcttcaggcgtaaaatacctttttacaagaatgtgccattgctactaaaaagcactcctaaagtcctaatagtcacagttctctgttaagtagtacattccagttttggataacctaccgctagggccctctattaaataataaagaagacataaataaataatttaatttcaaacaaaaaacacaaatttagtgaacaatgccagtatctgtgttaaggacaataatcaaattgaattgctagttgaagctagtacattgaagagtgcaatctacagtaaaagagagaactttgccctcataagttacaacaagagaattaatagccatctggaagcctgagtatgaagttttttgaaaaaataccatttcaatgactttcttcagcatgaggccaccgaaagagtgtccacataacagaaccatagcatcctcaagaaaagccccactgcaacagaccaaataccatttcatcacccgtgcttgttgtctgactgcgatgcgtagttaactaaataatatggtgatgacatccacactagtttggaaaaaaaaggaacaaaactttatgtaggtttatatcagttattcaattttgattaagctaagtaaaaatgtgctccttctccccttcatttttgtatgtgtgcctgattgtctatcactctgtctcccagtctctctctcaaagaaaatgggggctagcatataacttataggtaaatacatatgaagaatgatccatgcagaataagacaatctatacatatgacgtgggcttctttgatgaagtggtacattccgcaaggaaaaacttacgacaatggatctgataggacacttctgagagatggttcactaatgaagctgccctgagattcctgcaatccaaatttggcaagatatgagcaatccggtagttttgcgcacatgagaaagacacaattacatgtacagaaatcctcttgctttttcaacatgtcactttcccactcttagagagttgaggtgtgcttctctcatgcatcactatagctgaatatggatgtatgccatgcatgctattgaattgatgcggtactggatttatactcacagaaggtgcttccgaatgattcgaaacagcacgttcttcagcacacaagtcatccataaattggcttgcagatatgggttggtacatctggggtacgcagtgcccagctgctgcaataggagagcaatccagtatagcattggcatgtggcattagcctaaaggtgagtgatgctctacaacagcaaaggaaattgcaataagaagtttatcatatcaaatcattcagtagcatccatgtagggaagtatacaaatataaccacgaaaaaatggaggcgaaatgagatgatgaaaccatcagttgttaccatagtactgacctagtctcatttgtgatcctgtagcgagaagttgggcgcaaaccagcagtaacatggctaagtgcccttccagtcagaagcaacaggtcaccaggccctgaaatgccatctgctaggtaccattggccatttgggtcacaaacctaccagagaagtagctaaacaatgtgaactagaggccaggcagcacttataggctaattcactgaataaaactgaaatgtgtcgaccagaatagcagggagaaaagatgagctaaaaagcataaataaactaagaaaacagtaatgtatttcaaggaaaactaaaaccaataaaggttaaaaaaaattgaactttgcacagttgttacatggatacctcaattcctggatgatcagaagcaatgagcacaaggaagcccctgtcaacttgaggcactgaagagccgagacaggcagtagaagaagcatgatcggtgtggaggtgttggttggaataagccaccagcaactccgaggatgagacctcattaacaggcaatggagtatcatcgagcaagtggtcgaatacactggaaaatgtatagagaccaactcaattgtgagtaagtgtgaagagcaagatgttactagtcatagatgaagggattaaaaaaacaggcattgcattgtatttgtacttacttggtacgaagtcggagatggcgagcaatcgcagagagagcagcgcgggcagcctcaccgaaacacctgaaggcgtcgtccatgcaagcagggaccaggtcgccgccgccgtcatcggatgtcctactgcgattcagaggagagcgattgagattgagaaattcagaatggaaggcagaagagagaattcctaaaccttgcgctgccccctgcgcggtagaggtagaaggcgggttggtcgttggcgcggaagaaggcgcgagcggattggagggcgcagcggaggatggcggcgtgggcgtcggggaggtcgaggagggcggcgccgtggcgggtgagggaggcggagagggcatggacggcgcggccgtaggcgggggtcgcggcgccatcgtagggcgccaggtcgtggaggcgcaccctggcgagtcgcccgctgctgctagcggcggcgggaggtggggaggaggccgccatgagcatgggagtgggaggagctcatggtggctactgttccgccatctccgcctccctccactccacagcgtctagtgctcctcaacctgcaagcctgcaaaagaccccgacccccaatgctacgactgttttactgatttctttgtgaacaacagaaagatttttctttttctcttttcagaaacaaaaatgaatttgagtctcaatgaagttcatcaatcacgaaaacatattactacctccattctaaaataatttttttgtttgtaacatttgaccattcatcttattcaaaagatcatgaaattattatttattttatttgtgacttgctttattattataaaaaaaactttaagtatgacttattatttttatatttgcactaatttttaaataagatgaatgatcaaacattataaaaaaaaatcaaaacgacatctaatttagaacggaggagtactataatatatttttattaaggcatatatacagtctttaaataaggtaaattgctttttttgctatacatatatttcgaagtgttgataagattaaaatactatgtaaatatttgtcaagacactgtatatgtactacatgattttgtatatgcaattgaaatatatgtattttcataataaaatgttgatgaccaaagttaattatataggaggagtatatggttatattgtactcctctgtcataaagataagttcatttttcacacatcccacacatatactaacataagaaaaaccccagaaaattcatactttatcccatcccaatataattattcttcgttttatgtacttctaatataattatttcttatattactttcacaaattttgatacaatgatgattacttaaaataaacttattttaggataaatggaaggagtcaaaaaaataaatttattatgaaacgaaagagtatgtgacagtttgttaaggttttttgacatgtatgtatgtgtggtacctgcatattactcctacgtatgtatgttgatcgatctcttcccatcctactagaaaagggtaagggagaccgaatcgacggagtcggggtgggtggagatgcagagagagaggcggtttgttactacgtaatacgtgtatatatctataaaaccaacgtagtaataatagaagtaataacagattaaagagaagatcgaacacgaagaggaaggagccctctgcttcttccttcaattccttggtgcattgtgattgtgttgtgcacgcgagcgagagatcgaggccgccgccacgccatggacagcgcggtggactcgatggaagcggagtacgacgccctcctggacgccgtggccgccttcatcgccgagcccgtccgcaccacgggggccatccaggacctcaagaaccgcatcgacgccttctatgcctcctgcgatcgtgccgacgacctcgtccgcgccgccgccgatcgggtcgccttcaacgccaccggcaacgcccacgttcctcctcctcctgccgctgctcctccttcgcctgggacaggcaccaccaggatcgacgcgctgctgcgcgccgtggagggcattgcccaccacgatcatcctcctctccaggccaaggccaaggccgcagccggtgaccaacaccacaacttatcttagtttccttccctttctttttagcgctggatatacttagattgattctgcttaattgtctttactttgcaatgtaataatgccaatacgttccttcaattaagagcatttgaatttgaatcgaaaactcactgcatctattatatttatttatttatgcgtattgaagacaataaggttggatggtgtgcttttatcaaagtctgtttcttagtaaacccttatagtatactgtaattaaaagcctctttctggcttgatacgacacaagtctaattaagattttgactaccttttgagacagcagtgacatcactctaaaacagttgtatgtatatagtatggcaggttcaaaggtggttaggtcaataaatgattttattattaggggtaaaataacttactctacaataggtatttgtctgagagaatagtggagaaattgaaccacagccacacaaaagacggctcaaaagaagacaaaaacaagataataatgtgacgtgcaggttattgtcaaagccatataaatacttgctcctaatactccatatccattattggaggaaactaagaaagcaggcaaaggaaagatgcagagaaatgaaagaaaagcaacagcaagatttgacacccagtggtcatataggcagcacacagggaatgcagagtacctgctgcgacgagccactgtcacgctgtctctctgtattttgtagcacgagcaagtgagagcttgccgacgatgcccgacacaacaacttaatatggaacatgatggtcagcacgagcaatttagcattggcaagaagcgacttgcaaacataacatgaaattatatgataacaacctacaaccagccaaaaaaaaaaagtatatgcatacaagatattctatcccatatgaacaatgagcatgccaatagtgaagacacatgaaaagggaaaaaaaggagacacttaccagtggctcgatgttatccacttcaaacgtagactcccaccaacatcagcagtagcaggcacctctgcaatccaatcagcacagttggacgcacccgaccggctgcaagatgcaacttcagtatcactcattcatgtcagttctcaacttgagggactataactggtaataagtcggtaaagggtgcctgccaaccaatgcaataacctgaagaacctcagcactccatacagatacagccaaagtcatgtcacacgatcgtcaagctgaacttgtcccttatgttcacaattatgctcgactcttctcagaatagcatcttgtaattcagctggtgaaaacaattcgtacaacataacaaacttgcacatccagacggcagattaatacaacaccacattctgtaacatcattgttcaggcaagcagatggagtaaccaaacagaaaacagtacatagagcatcttcatccaacaattataacagtgatgatgatgactaatctgtattattttttgggttattcacataaagatatagaggattgaaatgtaccaagtttgagataaattaagataaggaactggaaagagttgcatcatatgtgatcattcaagttacatggtctacacggtaaaccaccaaagagtagtacctgtatttgttcgaaatgcaaatacctcatatggaaaataatcttatgcgctaaacggaacgaaaggctagatagagttggccacaagcgcacaaaagacatgcaatcagacaatggatttgaagtgtaaaataatcgtctaactgacattctgattgtgccatccatcattcctagcagttaggctttcttatcagtaggctcgaacgaaaattcagcctcaaccttcttccactcctccttggcgtcacccttgacaactttcctcatcgccatggcaacctccttggcatgtttggccttcctgctcttgagcaatcctttgatcagtccttgtacagcttggaacggcggcgcccacttgttctgcaggcattccttgaacacctccaatgcaggagcaaacacacccttgttgactagcccctcaagcaacataatgtaggtctcagagttgggcagcaccccctttccgttcggcctcggcacctctggcatcctcttgaatatcgcgacggcagcacccacctccccctccttgcagagcccctggatgacggtgttgaagctcccacggttgggtgggacgccctttgcctccatagcatccagcagctcggcagcctcaaagctcctccctttggagcacagcgaagccatgcggaggttgtaggtgctcacgttgggcttgagtcgcctcttgccacccgcggcagtggtgttatccttgaggaattgatcaaaggcggcgtaatcggccgcgttgaggtagcccttgaggatctcgttgcaggagacaatgtctggctcgacgtcagccttggaaggcatttcatcgaacagggcgcgggcggaggcgaggtcgccactggcaacaaaggacttgagaaggacgttgtgagagacgacgctgggcttgatgccgagctcggcggggagagtgcggaaggcttggatggcgcggtcgtagaggcggttgtcgtggtaggcggagaggagagcggagagggcgcggtcggagggcggggtgacgatgcggaaggtggagagggagtggtcgggcatgccggcggcggagtagagggagatgaggcggatgaggaagccctcggaggggtggggcgcggggagggaggtgagggaggaggagaggatggaggcgacgaggtcgcggcggccggcagaggcgaggcggtggacggagagggtaaagatggggcggtcggcgaggaaggccgggtgggagaggccggagatgaagaggtcggcgagggcttccggggtgtgggcggcgctgcgaatggagttcttgagggtggcgaggtcggcgggggtttgcgtctgtgactgtgtctgggtggagaggaagcgcatgaggagttggcggcggaggaggagggccggggcggggccagcagcgaggctccggcgaagggcggcggcggcggccattggcggaaggaaggggtttgtctctcttgttcgatggtgcaggggagagacgagagagttggagggtttagactagctagttgggcctcaaatggacctgcagtttagtccacaaacacaagtaactcactgggccgaaactgggccttcccgtgatagatagtcaagtgacagatcgaacggcgcatatttgctgtgaacaatccagcggcgcatctacgtcctactctacctgagcactggaggaagagccgaggatgaagaagataacacgaggcatcatcagtgatcaagttgaagtacatactaatgtattgaggagcgagagagtgatggtacgtcgagccgaagcaaataagtagaggatcgagcataattaacgatcggtgtcggtggagctgaagctagcaagaagcagcacaagacaatgcagagaggatgaatcttgaggtaattaataagtggccgtacatacaattccaagagtgtgaatgtgtgatcgatcgttgagctgaagctgaagcaaatacatgaaggaattaaggagcaaggtagctaattaacgatcgatccatcgagaattcgagatggcgatgaagtataaataaataaatagaagggattatattatttgtagatccactcgttggagcgggcgccggagtcgtcggtgggcatgtcgatgaagatgctgacggccttgccgatgcgggggcggtccttgagcttggcgagggaggagcggacgtgggcgacggcgccccagcagcggagggaggcggcgacgtcgtcgaggcggagcaggtactcctcctccgtcagcgggaaggaccgctgctcccggtacttccacatgacgttcatggccagcaggttccgccccatgaactccttctttatcagcgtcacgtcgtacgacctcccgtacttgctccttatcagcgccgccaggtccgccccgctgaacgtcgcgtcctccggtccacccaccaaccgctccagctcctcccgacgcctcttctcctcctcctcctcgtccttgccgctcgtcgattcacctgcgccgtcgcccacggcccggataaccgccaccaccctcctcctgctgctgctgctcttcctgacgctgccgctgctcatcaccacatatctccctctactctcacctccttgtcgtcgctgccatatgctatgtatctgccccggttggatgctgctgctcgacaccatattcatcatcgccacccccgccctacctgccactgcgaataactcattcattttcccattgattgattcattcattgatgagcaactgcatcaacaacaaaattaagcgagcgagagagaactccctctttcaaacatatataatggaatattatattgatccccgagcaagcaagcatgtatatagtatctggaaattaatggagtaattaagaaacaatcgcaacgaattaattacctttgaaacaagaatatatgttgcgaggatcggagcaaaatattgctggatcctaccttcggcctgcagtcatttacagctttgaatacgaaagatgagagaagaaggaagattaagaagatctgagcaagaggaaggtaagttcgaatagaagaagcagcagaagcagaagcagaagcaggagaagagaagagaagcggcctgtgggctccaactattctaccactcctcattttgtgaggtccctagcgagacacagggcagacagcgagagaccggcttctcttatgtggttgtcaagacggatgaaacaccagcaccacattttttttcccaataaattccttccaggatttctttacccttttttttctcttattttggttttatggtcccgatttttgctgtatatattcaaatgataatagcgccattccccaaataagaaattgctctccttcaagggaaaagaaaaaaaaagtgtggattacttaacaggctgatcatacacattttagagacaccaaccgttcggtcagtgccggcgtcccgatttgtttactatagtaattaatagtctcagaattaaatacttagtaaatggaaactgatatttatgaaaataagaaggacgctgttttgtgaaacgtccatgtatggacgttgttcacaacaacgtccagctgaggacgctctttgtaacggcgtccacgacctgcatgctgctccatcgccgactagctagactctcgtataagcttgggcttgcttcgctgcctacagcagtcctcgtaattcctctctcgttcaaatcgtgacctttatagtctcagtacgccgctgaggcttgccgcaactagccgccctcgttgtttttcgtcacatcccttgtgtctccggcggtgtggcctggcgagaccagtcgtgggctttctcggtgaggtccaagctctcctctccttctatcaattcatcgcggcagcgctgtcctcgctccatcactccaagcgactatgctcatcgatcggcttatcatgaacaatgatgatgtgccatttggagcagcacgggtgtcgtaaaccaaattaaaataccaaactaacatgtagtaagaaaacctgacaatagcatccatgcggacatatatagctaggaacacatgtttcatacaagttaatgtttagtcatgtaataggggtgcataatagacaaatagtcagttgatctgctttagttttgcagcacatgaacatatacgtatatacgaatcttgctaatggattcactttggaataagaaaaacgaaaatctatcgagggcgcctacaaaatggaggagattgggggaaggggatgtcatcaccgagtgtaagtgtgccacacataacgctggcttctacaagtaacgtagctcttcttgaaatcttgaggtggatggcgatcgattgtcttacccctgtacatttgaaaaggctgcagcgccattacctatccctgacgcgagcatatgagaagggcacacgccacacccctggatggctgcctgcccaaatcactagaggcagcgttagtgcggtaaggaagcaccgcggcagtcaagacatacaggaagaagctgctaggctgcaccatgggaggacgtggttaggaagagcgtccacactcggacgttgttcccagcagcgtccatcactggatgtcctagtagataacgtccattctattttcctaaatcccctccatgatttactacttatttaatttcaaggataataattaccataaataaaaaattcgggccggcgtctgtccgactgcgtgcaaacgtgcaatattcccctaaaaagttacagttttacaagggaaaaactccacattccaacaagcaagcaggcaacattgcaggtttgcactcaacaatcggttagttatctccacacaaacttggaacacgttacaattgtacatggaattgagtagaaaagaagctgccttgcacgctactggcactgcatacagattaacacacacacacacacacacacacacacagacagagaaacacacaggaacaacctctcctcttgcacccacaatacagacatccaaagctctgtccttttgaacccataacacattgaaagcactacttatgtgcagacaagcagcccttaactgcacttactagttgaaaacggatggattggttgttgcgctgctcacttgaacctcaagcacctccagtttccgctctaggatgtccagcttctcattcaaggacgcaagtttgctcttcgtagtagcttctgcacaaatgcatacaaacctgtgtaagcatattagttaacttgaataaacatgcatgcataagatatgctacccccagtccactctgttttgctgacatgctcgagttcctaatcaacatggagcgattatgttgtgaatgcatcttgtttggagcaaaaatggaaggtatgatagttaccagtgccttaatccggaccatattgaaaaggttcaatatgcattctggactaaatgtatacacggagggcaaagtacagaacacatatattctgcacagtaatgttcaaggtatctttcaagctttgtttttgacagtggtttaatggacataataagaagcatacagggcttggaaaagcaccaagccaatccctcctttccaagtaacaactactccacaattatgcaaaattttagataatgacaattgtgcaaatcagactgactagaacatagtcactggagtagttggctggccaacaggaaatatgctgtcttgtcaatggaagcttaactaacgttgatttaataagcttatagtccagagaattcatatcgtagaaaagatttaagaacaattaaaggtctatatccagtaacaccgttactgaactgaatttccgaatatgcttaagttagtttgtttggtgtgacgctggcagctgttggaagggcagaagaaaggcttgatttatagatactgtgttgacaatggcagaaacaagttcagattagaagggaggcagaatgggtttagagttgatggtactagtgtacatgggtgaggtagagcacatttgtggaaggcagggagagtggaaatgaaattttggttggtgcatatgcatagctgtgtcgccaagactaatggaaatgtggaagcccagttagggaaggagcaaggcagatctagtagtagaaaggaaaaagggtaatgcagatccagagaaatgtggctatgcctgagtagaggaagcagaaataaatgtgaatccagtgcaggtccatggaggaattatgggaaggataaggaggaagaggtaggaagagaaaaaacggaccgaatcggaggaggaagtcgaagaggcgacggacgttgagggagatgttggagatgaactcgcggttctcccagtccgcctgcaccgcgatccccacgttcaccgggttccccatcccatgcccgcccgcgcgagccatctccccctcccgatcgatcgattaattacctgcttcttcttggattcctccctcccccgattcacctcacctactctactcctcctcgccgccgccgccgctgctgctcgtgacgtgacgtgctggtgtcgtcccctcctcatcttcattctcccgcaactccgagtggcatctgttgggctgggccggcatgcatgagttagcccacgcacatgagcttgaacaaattcggcccagtttttcttttcccccactactttcatttcctttccttcgacctggagcaggggagctgcttgtttgctggctctggctcggtctggatggtggcgccgccggcggcactgcatctgctactgtcccgcccttggctgaccgccgcgcagctccggcaggcccacgcccacctggtcgtctcctcgctcctagccgaccgcttcttccccaactcgctcctccgctccctcctcccgccctcccactcccactccccgctgcgcgccctccgcctcttcccgcgcctccgccgcatcatcgctaccaatcccttcttccccaacgcctacaccttctccttcctcctcaccgcctccgcctccctcgctcctcttccccacgccgcctcgccgcgcgtcctcgtagaatcgctccacgccctcgccatcctcgtcgcctgcgacgcccacgcctacgtctccaacggcctcatccacgcctacgcctcctgcgccctcctctgctccgcccgccgcgtcttcgatgtcaacgtctcctgcagggacgtctgctcctggacctcgctcctcaccgcctacggcagggccgcccgcctccaccacgcgcgcgccctgttcgacgcaatgccccacaaaaccaccatcgcctgggccgccatcctcagcgcctacgtcggcgccgggagcttcgcggaggccgtcgacgtgttccaggagatgctcagggcccgcgtgcgccccaacagggcggtcatcctcagcgtgctggccgcgtgcggggcgctcggggcgctggagcaagggcggtgggtgcacgcccacctggttgccgcccacggcgcgatggccaaggacgggatggtggccacggcgctggtggacatgtacgccaagtgcgggagcctcgagacggcgaggcaggtgttctcgggcatggcggagagggacgtgttcgcgtacacggccatggtctcgggcctgtcggaccacggccgctgcgtggaggccatcgagctgttcgggcggatgcaggaggaaggggtgcggcccaacgaggtgaccttcatctgcgtgctgagcgcgtgcgggagggcggggctggtcgggcgcgcgagggagatcctggggagcatgtcggcggtgcacggcatggaggccggcgtggagcactacggcagcatggtggacgtgctggggcgggcggggatggtggaggaggccctggaggtggtgcggaggatgccgatgaggcccgactcgtacgtgctgggggcgctgctgaacgcgtgcgtggcgcgcggggacacggagggcggggaggaggtggcggcgatgatggcggagctggggctggacgaccgcagcggggtgcaggtgcagctgtcgaacctgtacgcggggcgggggaagtgggaggaggtggtgggcgtgcggagggggatggaggagaggaaggtggtcaaggtgccagggtgcagcatggtggaggtggacggcgtcgccagagagttcgtcgccggcgaccggtcgcacgaggcgtggatcatagacgtcgccgagcagctggagcggatgctcgcccaccactgactcccgtccgtctctcagcttcctccgtcaatttttagattcgactgagacgctgagctcatccgtccatccatgagagttgtacgtataactcttttttcactatgaccaaggagaacactaactcctccgatccatttattcatcgaggcacaaacaaaataagttcaactcttgtggaaaaactaagaaacattatacaaacattatacgtacagctcttgtggatggagggagtacgattcagtgactcttccggtgggatatgtgcctcataaatcaagaaacgtattagttcattgttgtaaatctgtatcgtgtaagaccacaatgttaaagagagaaacaacggagtgaacggcaagaagcagcgatgatcattatataatggttgtgcacagcaacttgtttttcatgttgtaagcaggacacggcacttttagcgtgttgctgatatgccatcaatcaataacatcttacaagccgttttcgcaagttaaaagaaaaaagaaggggacaatcgagcatgagttatcacaatgcagcaacaggtagcaagccgttgtgcctgagcagagcttccggtgatggctcccgtccgcggaaagacacaaacacctgcattttcatttccagagttagcgtacgtcgtcttattccacataagttagtgcaaactatgccctttacatacgcttattgcacaaataaagcatccatgtcaagagatgctgtcaaaggcaccagaagcctacctcgagtggagattttccacctccaagcgcaaggactgtttctctgaatcgtctgccagtttcctcaattgcctagataaagtcatagctagagtcaatatcattgatttttatatcctttctgtattctatgtgccacacattgttttgtagggcaaaatatacgtttggccaaataaacaaattaagttaagaaaatgactactaaacaagtcattttgacacatccagagcacctccctggatgggggaaaacaagaaaaactgtaccttctcattgtccaaaccaacgtcttcaaatgctgagaatgcatcagctgacaatacttcagcccactgtgcacatagaaaagatactagtttcagcatactcatatgccacagaaggaacgtaatgttttaaacgtttacagcaatataccttgtaactgtagtatccagctgcatagcctcctgcagattgtcaataaaaaaaatagtgagatctgcagtcaaataaatgaatgaatgtacatgtaggttaaagcattgcaaacctgcaaatatatggctaaagctgcacaggaatttatcctccggaagaggagcaagaacctgtgttcgctcagcaactcttcggtcgacatcatatatggacaatgaaccatttggatcgtaagtcgtatgcagctccatgtccacactagcaaaacgtatctgcagaagggatggcaaggattagccatttagaaagaacataggcataaaggaagcataaattacttcatacacttgttagatattagtgtgatgtgtgtatgtgaccatgacctatacacaatacagacaaaaataaaatataaaacatacctgacgtaaactgaaggtgccagcacggaaattctttgcagcgacaagctttgcataaatttcctctggaagaagttcgcctgtttcataatgctttgcaatgctcaaaagagtattcctggcaccaacaaaacaactgtttaacaaacaggttcaaggctacaagttaaaaaaacaaaatgatacagatccatcttacttgtggtagcaccagttctccatgaactgagagggcagctctacagcatcccattctactccacgaataccagaaacaaatccttcatcttgtttggtaagcatgtgctgcagcgcatgaccaaattcatggaacacagtttcaacctacaaaagacacatgccaaaaaaaaaagaaattaccctcataatcagtatagcactacttaattgatatggaagcaggtgtgtcacaatcttcaggtgaatttgataattactgatgctctcatcagtactttagtgtacagttttccacatattgatgtaacagaatactcatacattggagactatctggaataatttaccattgccatatttattattgcttacctcacggaaggtcataagactgggtttatcaccaactggtggggtctgattacacaccatatgggcaacaggaagcctgacaggtgaaccattgcgagcaagcacacgactgcgagaaaaaaccacattcatccaagcccctccacgcttctcagatggtcttgaatatggatcgaagtagaaataagcaacagggctattcgaagaatctttgacacagtaaaatttgacatcactattccaaacctgaaaaaggtaactcagtggtcaatagctgcagaacattaacatatagtttgctgaagaaaagaaaacaactgcttacaggagccagtccatctgcaggctctacgctaacaccaaagagcctatttgcgagactgaagaggccatccataaccttgggtagtgcaaagtaaggacgcaaatcttcctgcagtagcaatgctagaaatcaactcaatggcccatcatcacaacaggagcacatttaatagagttcagctcaacgtatatatggacaaaacagtaacccatcacagtttagccatcaaaacagtactgatcataagaaatccattaaacatttctagagagcaaagaaagaacctcgttgatatcatatttagattcccggagtcgttcactccagaagcttaggtcccagtgagccaggtcattggcttctggagaagcagactctttagcaaaggcttttagatcttccatatctgcacacagaaaccaacagctaagatattcgaacctcaaaagatgcctactccttatagaatatgccacaaaaatttgctcacactaagacaggtatgtatgaaaacaaagatgatacataaataacacaagagaaatacaaagaagatactcaataatttgattggctacctttaacagcatgatcccaggaggcagcacggagtttctcaagaagctcttctacacggtcaacagttgccattttctgagccatgcttaccttcaggatttaaaactagtttagaaaagttagataattgtatacatgattttaatgtggaaacagtgacaaatgcaagcacctcagcatagttcttgtagccgagtagcttagccttctccagcctcaactttagaatttgactgatgatattggtgttatcaaggtcgccactagaggcacgggttaggtaagcacgataaacttcttcacgaagtgctctgttccgtgcatgctgcataacagcaatatagcttggcgcatccaatgtgatgatccatggtccgttttcagccgaagcattttcatgaccctaacaaaatggcttgtcagtgtgatgaatcaagagagaacttttaagcttcaataatggtgtttatagcttatatacctttgacgcggcagtctgtgctgctaagccaagtgctgtggcaggtaacccatcaatttcattcttatcagtaattaatttctcaaatttcttagttgcatccagcacattttcactgaacttttgtgttaacttctcaagctcctgaaatgaagttagcattccattaattaatatgcatcagcaaacatccaaaaataaagaaaataaataagcatgaacaaaaaagtaacatgaagagaatatatggaatatgacaaccatcagaagtattaaatagcatctacaatcagctacaacaaacaacagccaccccaaaaagaatgtgacatcacagaagagaagaagctaaggtttatatgagtcaatgtcaagtaatcctaggtttgttgaccaaaagcatgcagatttgtcaggacgaaacaatcaagtaaattctggcattgtttgtaataatcagtataatgtaatgcgtttaatcaaaacttgaacagtgcagcatagtatatagtatgctttaagagcatgactggtgaaaaagatcatgtcagagcctatgtccaactatctacaatgaagaaattttttatgttgctagactgcttgaaataagattttcaccgaaataaaagtgtccaatatttgatggaaaaaaaagattacctgctcgatttgattaaatttctccctctgttcatcctcaagtgcgactccacttagaacggcttccttgatttgggctggtgaaggggaaaaaaggggaatgttgttaggaaaggaaaatgcaagtactcgtctgccataaagaaatgtggtcaagttggaagttgacttggtaatgtttggaagtataatatataacgatgaatgttaacagcattagactatgacgacaagggagataaacatggtttgagtgtggattgaatataacatagaaggtcaccttctactatacgcttgcgagcctcactgagggtttcccagtctgaagaattccttatggcgttgaaagcttggtatataggcttgctctggcccagccttagttggaatttgactttgtcaggctgtgcagcaagggtcaaacagttgagttgatgacgatcagtgaagtgaggatgatgagtcaagcgcagctgttgtgggtaggtacctgaacgtcctcgacggcggcgcggaggtcggaagagtccttgacggccttgaggtggtcgacggtgccccagacgacctcgaggctgtcgacgatccgctcgagcggctcgaccagcttcccccaggtgggctgcacgcccttctcgaggtcggtgagctcgccctcctgcatgcaacaaggaagggtcgggtcagatcggaaattaaatttgcgggaaggaagctggtggatccagggcagggcaggggacgtacgaggcgggcgaggagcgtgcggacggcggggcggacgtggatgggctcgacgcggtcgaagggcgggaagtcgaagtcggcgaggagcgggttgtcgtcggtggccatggaggaggaggcgtaggcggcggagcaggtggcgggcgaggggcggcgggaggcggggcagaaggcgcgaagaggggaggaggcggggaggaggaggagggccctagacctagacctagaggtatatgaggaggaggtagggtttgggaggcgagctcgagcgacaagtgggagacggatgaggaaggaggaagccgagacgatgagaaacaccatggcgacgccgattccgcttcctcctccgacgccgactccgactccgactcgtggtgggcccatcgctctctctatcctttcttttgggcttaccggtaatttcatgggccaaaatatccatgcgtgtgtgtggcgcctgggagtctgttttctttttctctatttttctatttttactcgtgggagtctggcttgacctcgaagccacaagttgttaaaacaaaatttaagattgctatcgatgagtactctaatccatgaaatgttatcgaactttctagagatatcatcgtacaaatgtttttctcagaaatgtcatcgcagttatgtttctaggagaaaagtgcttaatacgatgacatttccggtaagttgggttcgtcaatggcattttcttggattggagcgcttgtcgataatattttcttacaattttttaaagaagacaatatttatcaaaaaaaattgaattgttcttaaaatatgttcaaatttgatgtggttactgcatgattcccgttactttaccctgagacaatgtttggctaatgggaaatggaaatgatttcccacccatcaaaaaatatctttaaatcctaaccattcattctccctctttcatttaattataacccttcatttattttccaattataatcccacctccccattttccattatccaaacaaactgttctcaagatacaaccatgaacgctaatttagcacgcatgggagccgtcaggacaatataacagcatgtcagcatctctcaatttgcaatttgccaaagaagaagaatcttttattcattataactaacttgcaaatgaaaaggagaacaagggagagtagtgctagctaagctagtgcctagtagtagtggttaggagttgtggatctgttagagaattaatcatcgatgtacatcaattatattgttccgggcaaaaacctttctttctgatcttcgtcttgttgtcgttattcctgactggcttggattaattgtgcgattgctactcctcttatatgattggtcagtataattggttaggactcgtgattattccagctgctacaacgcagcatctcatttcatttcatgatgacgcggttgcaaaggcgcgacacatcagacgggcgaaccggtttgatcaaaaagtcttcagccccctcctccaggcaccgccggattctcgtcggcgaattctccgacgacattagcaccaccggaatctccttcagctccgccgactcctgccatgcacaatccaatccaatcttcagttgctactacaacatccagatacagagagaggagctgagtgactgtctgaaatgctaaccttgaccctcttgaggagatcgaaccctgtcatctccggcatgcagtaatccgtgatgatcatatgcacattccgatcctgcatcataacacaaactaattttacattcatttctagcaattcttcaaaactgactgacatccacaggcatagggatcaaagaacataccaggctgagaacctccagtgctctcttgccactatccaccgtcgtaactgcatgcacaacaacaaccaaacaaaattaaaggtgactgactgcttattgttcttgatatgtacttgattgtactaaccaaccagaccaaatgagcaatcaacgacttcattctacatgaaactcaattctacacagatgacagatgacacatatatatttgctagctagtagtcatatcgatcagttaatagaaataaaatgcgcgcaattgtacctcgatatttggagctgcgcaggagtctggagatgacagtacggtcgacgatgctgtcgtccacggcgaggacgtgcggctccggctccggcactgtcttcgtcgacatgaggcagagaatggagcagagcagagtagactctctcttttggtgttcttggcgatggacaagtcgcagcctggcctttatacagtggtagttggcaaagaactgagtaccgaccgaccacagaatatacaatggaaaaaggaaagcatttccaacaaggagaaggagaagaggatgagaaatggaggaggatgagatctaagcaaatctgcagaggcggtggtgcagcgctggccgaggcgcctaccccctaccataccatattgtaccatgccaggcgtagctgcctgcccaaatatccatacccataatttcctattcaggctcctcattatactagtatctgtttcacatggcacaatactgctcacccgccctcatcatctataaaaaaaagacattaattacagtcaacacaagtgtgtgtgagaaattagggggtttaaataagatgcccccatgccatccatttccttctcagctagatgagtcacaccttcatatggatttcttatagctagacaagatccagatcttgagtagcatattgattgattttgtcccctatctcaaggttttggcatttcatttggctgtattgctctttgcaacaaggttcaaacatgcaaattcaaggcagaaatgtgagggaagttcagcaacggaatccatccctgtccctgtaccttagggagccttcccaacagtagatgcactaaacacccacgctacaagaccaacaaattatcaaggaccaaaacaaatattttccagcaatatatgccctaaacacccacactacatgcacgaactatccacattacagcatttttgaaggaaacattacagcatgtccaaaatgtatagggaatcttgaggataaaattatttgtgcacggcaactactactccacagtcccacccccattctaaaaataataatggcggaagaatgcattcttcaaaaactaatcaaatttcaagaacccagagattctgatatatgatgtctgacctgaggctggagagttgagaagcccctttattttatttcctgaagtcagtttctctgtatctggactgccgttcagaagcctacatccagcatagcaacgtgattggtcgcagaagaagggttgctgctgctgctgatccatcttgggagtcgtggctttttctttatgaagcagcatttccttacttcatccttcataagcgttcaagtttaagctgttcaggtataatgagctgctgctcttgagtaaacatcaggggatcacagctcagaatcataaggtcaactcaataaaaatgaaattttcagctcatgcttttgagaaacgtaagaatcaaaggccggtaatgatgcaagaatttttcatctgactctgctgcaacgtaggaaaatgtacttatccttgcgcatttggtgaaaacaaaatggatcagatatttagattcagttcagctggagatacgaggtgctgtgagagcgagacatttgcctcttccacacacctaaaaggtctagtaatattcaagaaaaacaagagttgaaaatgttatatagttagctactgaagcaataatccacagcaaaattccgggacatgtatcatgtatgtggcacagtaccactcagagctccactctgaagccatgtattgctgatctgttttaaaaaacaaattaagattaaacaattagcataacaaaacacatcttttagcagccagatggcattgtggagcacacaaggcccctcatacaggctgcactaaagaagagttcacatcaggtattaaatttgacgtgtcaatctaaaaaaatataataggtcggcatacacttaaacacgcccctacttgtgcttgaggcaatctttgatgttggtgcccttttacaatatgaaagtcaaccatgttactatgaatttgaagcatccagcatgatatgccactatcctgagcaatgacagatggatcgcaactgtgtgtcaacaattgacaaaatgcatctaatgtttttaatgcaggagatcaggaaagtaacgagagaagcctcattgtcatctagaagagaaagtagttagtagggacaattctacactcacaaggcattatttggcacatatgatcaaaatatacccccattgcatacacaaaaaggaacgaacgttcaactgcaggatagagttttatccaagggaaacgtgataatatagtatagtatctcagataggtaaaaggatactgcttgtaccttctaggacaaactgggtgaaataggatatgagatgttcgtagtgccacatattccatttcttattggcctagaacagaattgatttaaaagcacaaatcacagcagaagttgtctatttgggctactaaatgtaatacctctccgatgggattgccacaccatggatggagaactaccagagtttatcataacttggctagtcaaggattgcatcatatctgttctatactgatagctgcaggataaaaataatataaataatgagaatctcaataattcgtcctccaacagaaaacagtacaaaatattgtagagaaataaagaagaataaagaatatgacaaaagtagattagcaggatatatgatataccaaatactcaagcagattctctctcatttgtactcattacttacagggaacattatgatgtttgtgtattctacctacaaaggatacagatatctacaacttgtacaaaaaagaggcacacatgagaaacacttcaaacctatcccacctaaaagatgccaaactatgtagcagactatacatgagctaatgttagcagcatatttaccttatgcatacaatacacacacacggctccaatttttcaggaatacgcaaaaggattgtgcacctttgtattaagagaataaaacacacacaggtccaatcgaaacaagaaaaaaaaactctagaacagcgtcttatgtttcaacaagtcctatattcttgatgacaaaattcaagaactccacataagcaacttaatccaatgatgaattcatatttttcatcgccagattatgctctccacaattatcataccacaccactctgtagaaaaaattccacatgttggactatttaccctcgccctctggctacacgaaacttgcaacagcaatccttgctcaattttttttgttgttgcagttttccagatagttgaaactttgaacacaaaacgaaaccagtcctgcggtaagctttcagatgttcttacgaggctgttcagtagctgactgttctaaaaagtatgcagccataccatttggtccttttttagtattaataacagctgatgagggtagaggagcattaagagaatcgataacatcgtcaacaagttcagtgtactgtgtgtcagttagctcagacatagtaccgctcccagtgccactactgattgtgaatacttgtttcctttgccgaagccctgctgctcgtgccacttcaaaatcattgcttactcccattgatgaatccctccaagaagcatcttgtgcatatagttttagagaaggcgttggtgcaagagaaggtgtaattccagctaccttcggagggtcaatgggactattctgttgccagaaatcatatcaaggcagtaagtacagttccgataccttgtaacaccagatttaaataagtcacagaactcaccttagtaaagaagatagaagttcaaagcaacatctgagggaatgtgactcacctcatggtcctcatccaagtcttctaaatcctctttcacatcgtccaatctactgtcttttgcttccttatccatccgatgccaatcaggtaattcagagcccttgggggaaactgaagagcaagtgccattggttagtaaagatacatattctattttcccaaattaagtgataatgtattaatgtgcaatcaaattaagccataatgtcagattattgaaataagaaatattgtgctatccccttggtctttttcccactgtgtagtactattactgctttcaatagaattattttaagttccattttagaaagttcacccaacagacactcacctttatttccaacatctatagacagttcttggacagcctctgtaatgttgagttcagaatgagaagaagaagagcatctggtattatcatggcttttttcagcttcagtgccattatccacaaagaggggcatccctgccaaacgaacagcaacttctggtccatcctgatactgtggctcagaaaatcctttgtcaaaattttcagtggctatggggcaattatcatttggagcatatggaagcgatcctggcttgttcagaaaactttcagtgtacttgacatcctccgtaattatggctgcctgctctgaattataggcaatttcatttaatgtttcgttttccctttcttcaccagcgggaatcatatcaaaactatgaacatcaaccattagaggatcagttgatccttttccagatgatcttacagcttcctctgtgcagttatatgaagcagacctatttgaagagatttcaggagtcaaagtctcctcaaaactaaaattttcgtcatctgtctcaactgattctccacgggctgcttcaggagtttctatcaaactacattcaggcccagatgacatggatcttgagtagtacggatgatccgttgaatattttgactcatctaaaagattgcaagcccctgagaaacttgagatgcttccatctcttgggtctgacggtgttttgttggtatcctgtagatctgcaaccatggattctccagcaacgtagcatgtagacttctcagcaatatcaaccttatttcgagaaatgggagtcattgtatgttcatcttgtagcttgaatgagcctttttgaagccctaagagatttctgttgatctgtgtgttatgaaaaacaaatgatgaattatttgaatcagcaatgttgccatcatctagagatattaaagtcccctcaatgctgaagataccatcatgaagcctatcagatgataatttctcttcaacttgaagaatgtctgaaatactagcatctggaatatcttgagaccccaaattggtaaaatgatctttagaattgtcatcctggagagccatgtaaagattctcaaaacataaagcggtttcttctccttgttgatttccttgctgaccgcttcctaaacatccagtcaaattgacatctgcagagaacaatgatgaagttgtcttgtatgggttattttcagccttggaattctgaactgtatgaacagatgaaaaagacggtaagtccaagtaatcatctgattttcccatgtcattgcctgtgtctggagttacgaaagcattaacaacattggatgaaacttcatgtagtaaaccatctattgattccccagcaacttcaagagtttctatcatgttggtctctggaataaattcaacagacctgttgtttccataattttctgtactattcacactttgaaacatcatggtgttcttatcatccaagttgaaattttgattgttccctggttcagccaatgcgccacctccggtagcatgcattatgttaacctctgaaacacatgaggatgacctggaatagagtgaatatttttcagaatttatgctctcttctggagatacaaaacttccctctacaccaagagtaagtccctgtattgtttcagatggaacttgtttgccatcatgaaacgatcgaatctcatgtctgtctgaaatacattgagaagatccagtgttattcgtccaattttcagctcttgtaacctcatctagaaagataggattatctaaaaaagcagaagtttttccatcttcagactcagaaaatctgccctgaacagaagagggtgcattgtcttctgcagcactggcacgtaaaaggtaagaactcgagctgcttgaataaaatacatcattattgatctcacctgaagataataaaatcccttcaaaattacaagttatttggtctagctgattagaaaatgcttcctgagttttctcctggccaccttgaatttttttcctcacgttggtgtctggaacaaaatgtgcagggttactatcatcacatgaagggttaacagcagcctttatagggttaaatggcccttcatcttgcgattcagacaaacttttcttgacagcttcatgagcttcagtaatggttgtctctactccattgcataaaaaaaatcggatgtagctaacgagtgttcagaaatatcaactacaggtggatccataaaatcttccttctccaaatcaaaaggtagactgttcggctcctttaagtgcaagtcatacgataattcctcctttgagacctcatcgctatctgtgagtagctctccagatgttgggttgttcaattcgggattaactgcaacaatcctaggaatttccatcatattggcatcttgacagcataaagggaaacctgaagttttcatgtactgttcagtggtactgactgcaagcggacccagcagagcttcctcctctgaacagatgaatacatcatttccttcctgcccgttaaatccacatggttctttttcccaggtatcctcatcacccttcatcgctaactctgcagaggatgaaaatctcacctcaggatcctcaaattcctcgcaatgcgactcttgaaatgctggaaggttcaatctaggactgacccctgtatcaatgtctgcaacagctgcaatgatgtttgcatcagtacagatgcaagcaagtgcattggtaacctcatcaggattaattatcacttcattgtcatcaatggcatgtgaagtagggaccttctctggagtgacagtatctgtttgcagcgctgtcaatttgtgtggctcaagcaatgagtcctccttgccaccctctggaggaacctgttcaaagttttctaatgcagatagcactggatcagatggatcctggctcacatcatttaagctaccataagcaacaatgtagtcagatggagaagcgggaggttcattaatagaaactggataggattccagtttttctggttgagatggtgagctttcctcactgactttgacaggcatttctctgaagacagtcattaaggatgacatcccatgttcagttaagcatgagtcacctctatcaaaagaactgtcatgagagttaactggacatatgagattctccttgcaggagctgaaattagtgttcacgatgtccaataatctatcaaaaactttgtcttcaccacctcctacaggcgattcgtgatgaatagttggaggttcagttaacttgacaaatataacaggtccagaatggttcctgtaatccagaggagagaaaacagtatcttcaataggatcatgggcaccaccttgctgatctaaatgtgtggaggcagctggtacttcttcatttccatctctcagaaggattccaggataccctatcaatggtgctgaactgccacaaatcggttttatgttgtttgattgacttatagaggaatcacttaattcaggaaactccttgccgcagatggaacctgcgacactagatgacattgtattctgtgtatcttcctcgatgctttcggtagcaatgcttgttgttctatatgttttctcacttgagaatctcctcttccgtaggccatccaagggcatcggctggaagtccttactatgaccccaagacatgtctgcttcaccatcaccccttgagctaatacttggctggcggcgtttcttaggtttagaagttctgttctctgaatgagttgctggcagaaaagtactatttgaatcagttgccggcaaagaattactggcatcatctacatcgccacagttctgcttctgcaccaacaaacaaagagcaataatgttgagcaaagcagaacaaaaatggccaaagaaaagaaggaaacaataaccaaatcacataaatgtaaagaactacatcatttgcaggttaagcttatatgcagagaattagaatgaaggaaacaaacagacctgtgcactgatcaggtcgttctggttaggcttccttggctcaccatcatttgcctgcttctgctcctgaatccttttaagccttctatggtccttgagatcaactgcaaagcaagatgagatgtaaccacttgagagatattctagcaatgcactgtgaggatacacaaagaattccacatatatttggtagcaagtgcggagctttaacagtatgaagacattggtgctcaagcttgccaaatgttagcaacagtctgaagagatagagtcacagagacaagaaaggtggcgaagaaggatgttacgcacgtcttctggtgaagcggatgaaagcggcatagatgagtgtagctagagcagggatgacaagaacaggcagagcttggatgggctgcctccagctcaaattgcgcctcctggccctccagaaagcataaacgaacaccaggacctggcgatcaatttaagcaagaaaagataagaggaaaaactgaagtttttcaattcagaagtaaccaaaatcacatgatacatcaattgagattaaaaaaaagaagaagaaaaaagactatccagccaacgttggaggcgacttgcgtgatcgatcatcagcatccgcgagtagcaaggaaaaataaatcgattggtggtgtggctagcgcgcgcataaaagcaaacacctggagcgcgcttccgtggaaacaagtgtggtgacgtatgggggcagggcagggtcacctcacctcgaggttgaaggagaggaaggcgagcttgtgggcgagcctccgagccgccgccgctcgcctgacaaggcgcgaacgcaccaccgtttcctcgttttgaccatcgtcgtcgtctccgggcccggcggggtggtgtgcggctccagtccggcgccaagcagcgcggaggcgggaccagaccccggagaagaatccgacggagggatcatcggcggccatccctttcctcctcttggctcttgctttctctctctctcttttctgcgcactaactagtctctcgctctcgtaggacatgcacgccacgccacgcactagcagaggcagaggcagaggcagaggcagaggagaggctttctcaactcattttttcgactcttttcctatagaaatcattcttgtgtgcagttagctaatggttctttaattttcctctaatccaaataaaatcatatattgtgattcagacaagattttgtactcgttgttggagagtttgtgcctgccgactcatactgcgccagccaactgaatgggcttattattattattattattattattattattattattattattattattattattattattattattattattattattattattgcgtttacgttcccccgacattcatttatttttaaaaacttaaaataaccaatactcgattaattatatattcacatcgtttaacgtatcttctctttcccattatctcgaacacaagtgctgagcctttcttaatttctcaccatacatactagtactatcagtgcaagcaccctaaaccggaacctagcctataaagttgacccgaagatactcatccctacagtgcaaatacctcttttgtgtgacttaattagatgagtgtagtgtgggaggaaaccgaccctatagtgggcgtgatctcgggctgatatcgggctcgtggacacgggtagtggggcgaaataatttccccacctaccctcgactcatcttctcctagccctcccctccatcgctttctcctcctcccggtcacccttcccgtcgctcgccgtcgcctcctccccgtccggcgccagttccgcttccgctcgctgcgccgcactgctcctcctcgcctcaccgcgcctcctctcgcgtcgtgtctcgcgcggcggcggctgctactgctccgacggtggcgagttgcggcaggcagcggcacaggcccctagattcgttggcggtcgtcaggaggcgaattgcctggagaccccggagcaagccaccgccgccgcgcctcctcgcccacagtgcacgcggcagctgcgaggaggagggggagtagatccgggttctttgcggcagcggcaggttctcggtggcgggaggcgtccccggttgccgccgcggcgtcggtcaccaccactggcctcgccgccgcccggatgattttgcttcttgacttttcttgatgatttttcttctctttcaatccccaagattttcttgtcttttcttggctcggtggtgggaggaagaatggttgtggcgggagaagaatttttgtgggcacaacggggatttctcccccctcgattggtgcgaggtcacgggcggggaagaatcgcaccccacagtgctgacgcctctcccagttttggccgcgcgtggactcgtgaacatgaggttttgcgtcgccatgctaggcgacgaggtgccttccttggtcgcggtcccgccctccacgtcgacccgaatccgagctagcgcaacgagatcacgcgccagctcggtgcactgtgagatgaatctgatcatctggcgggcaaaccagtgagtcagcttgtttgaggttacctcagctccaacagtcacaagtagtcgtacggtagctaggtaggcagcaggtaggcatttttttgcattggcgggcaagtcgtagcagcgtagcttgcgactgacaaggcagaattcctccttatcatctcgctggagttggacggcgatgagcaagagggcaaagcgcgtgggcacacggcggtggtcgtgctggatgcccatggtcccaggtaggccaagctgccaggggttaccagcacgcacccccatggcgttcaactcctcagagaacgtctccggccacacgtaccggaccaccgggggcgccgtggccgtgggcaggtcgaaggcgcagaggcagcgcaggcgtgggcagaggcccagctcggggacgaacacgccgcgcccatcaatggggagctcccagtcgccctccttgcgccaccccacccccacgggtgtcgaaggagtaggccggtgtcccgctccgacacccacacgtgctcgccggcgcccatccatccccgcaacgtgccgccccagagctcgcgcggcggcgccctgagactcgtcggcttggagggaggaggagctggaaggtaggggatctcctgcaggggcggttgccgatggcgtagactccggttcccagcgggatgaggaccgtgccgcctattatctcttccggaagctccgggccaggcgacaacacgtcggcggtggcgtcgcactcgaggtcgaggaggacagtgcgcttgcggttgctgaccccaacaatggtgttggaggcgacgacggcgaagttgaggtactcgagagcgagccgccgcaacgtgtccatctgcgccatggggcggggcaagggtctcaacactgtccactcgtcgtcgtgggtgaacatgtccttgatgttaatgttgaacaagaggtaggtggtgatgcaatccatcctcttctcttcttccaccaccaaaactagagttttcctcctccccttccatcttgtgcttgtgcgctgctgctgctcatccgcctccatctttttttttctttccgaagaagatactccctgccccgcctagcctgtatcgaggaaatcttattatacacaagtggagtatgtagtccgattccgtttcgacctcgctggctgcatcacaagtcgtttcgatcctacaactgtgtcgctgtttagagtcatataggactttcttggttaggtccgatactctggttaagttgatatttctctaattgtactctcgttttatatagttttgttatgttacatctatcaactaaatagatttttcatatttctgaactgggtgatgaacgtagagcagggtatctgcatgaatattaatttctggtttgtgcaaattaggcacgatcaatcactagaagatggcacggtacatagaaaatcaaagaggaagttaattgtaggagtaaaagaagtgatgcacgaatgcatgcatcaatcacatacgatcttttttgtttgaactaggagagcatggagctcccccatttccattaatagaaacgtagaggttacagagtagcatcaagtttcaggacatcaatcacatagtaagaattaagatagaaagattcagattgttcattcagtcatcgtctccgacatggaagctcaatctggagtggcttgctgtcttggtagctgctgcttccgcacaagattctgaatcagactcctgcaggggccaagttagtattagtaaatcaggagtaagaaagaaatatgaatcattcatgagcatgcatggatatgacattgagggaggaaaagcttatcttcattaagcaaagcaaattaatagtactagtaatccattaaagacggacctgggtattgtgggtgaggaggagcttttgcatgttgtggtggcttcccctcgagtggcccatcttggccttgttcctctctgctcgaagccgatccagcttctgctggtccttggcgtcaactgcaatcgacattaactaatttgacgatcgatcattggttattgatttatgcagtggctgcctccactccatgcgcaattaaggttgagaaagaaacaaattgacgatcgatggaggaactaaggacttactgaatttgtggaagcgggcaatggcggcgaagagcaaggcagcaaaggcgggcacggacaacagcacacccagcagtagctgcttcttcttcttcgttttattcgcagcagtcttgattctcgccgtccacaacccataaacgaataatccagctgcctcaagggcgaaggaggtgaaagcaatggtgcgccggatgacgcgggcggtggcgtggcgcctctggatgctggctttgacggcggcttcctcgtccgcgaggcgccgctgctcgtcggcgtcatcgccgagcttccaccacacgcccgagaaggaccccgtgcggggcagctgccgcgccatgatcgatcaggccggtgctacgtacgtactaccttcgatgttcgatcgatcgatcaatttcttcttctttcgatgtgaatgcgatgccctcccattgagaggcgactatctagcttgctagcggatcagtagcttttcatatttatcaaaacgcaaccccaagttgacgatcgatttcttttttcccgttttctctgtatataatgtaatatgtgtgtgtgactggcatacatctcatactgacaccagccaaaatcactagattaatatgatccatataatactcttatttgacagtaagaagaatgatcgtgccaggtcgattgcagtgcagattttgacgccgaccaactccaattaaatcagacaaactagtactccttcctaccactacatgcatgccgcagcatcatcatgcttgcgtttcgtgttactctctctagttgttagtgctgaccgttgacaaattgttggaaaagttcactgtagatccctcacggtaacggtcaagtttaaatcttatctctcaaccgtaaaaccaggtactggtttgatttggtccatattccacgtgaagttatgagcaaaacaaaaattaaaaaaatataggctcatatgtgaactacacaaaaagatttaaaaataaagggcctcatatgtcagtgtttcattaaggaaatagctatacatatgataaaattggtacgattttgttacgatcctgtcttgtatgcgtacgattagaccatgaaaacatgttggaagcatcgtacgttgatcgtaagagattttatcgtacgtatagcattggtcgtttcccaagtcctccatctcaccctctctctcccctctctgtctctcatcaaatgtcgccagcgacaaacctccatttttttatccccatatccctctcgacaacaaggtgataggcagcgggtagagcgagtgtgtgtggccggaggcgacccgtggagaagcgagcggacttcgacgagcgtgcagaggcgcaggtggctgcggaggagcgggcaacaacattcctctccagccaatggttggcctccttccccttctcgctccccagatgctaccggtggctaacaaaagaggagcaagacaacggtgacctcatctctgtctaagtggcttcctctccatcagcgtcaaactccctctctgtcagcattgagctcccttgtcggccgaccactgtcgccttcttgagctcactgatgcggcagcggcggatctcaagctcaagctcacgaaggagggacaccaaccacaccatcctcagcttgcctccccacaccccccgccacatccttggcatccgccttcccgcgcccgcccgctctagtgatcacgtccttgccctcatcttcgatgtcgttggccgtgtttgcctcgacctcgccggctgcgccatccttggcatctgcctccccgtgcctcgttgccaaagatcagaatagagagagaggtgctttgtgcatatggttttctttcttttatagtggggggagaccgagagagagaaaggggtagagatggttttctttcttttatatttttcatgtgattgatatgtgagtcatacactaactcaaccaggttggccatagtcaactcatcacgtcagttaaaaccagatacaatactaccctaagattttaggtactctgatatttgtaggttaagagacatactatatttgatattgcgatttaaggatgcgattcaaactcgatgacaaaatgtacctaaatttgacttattcataaattgttgggcgtggcagggcaggccctgttacaagatgggccgaccgaggaggcccgagggtttttcggtcaggacaaaaacactccactcacatcctcctcatcacaaatattttattttctgctttattttttcccctaatgaatacctgatcatccaatactttaaagacatgtactgttggatatacttgtgctttctatactcttttttatataatacctaatcccttcttcccataaaaaaccaatctagtgttggatgtgattctttttttggacggagggagtacatcgttaatatatgacactgattagttaaaaatgataaaaaaaaaacaatcggagagagtatataatttggttagtaaaagcaaactgtaatgattatagatttgtgtttctacaacaacttggaagataaacaagcacaggatgacacataaaccagtttagctccactccggaaaaaataaaaaggacaagtttacaacaatccaaaaaagatttacagacagatccagcccagagaatcttcatctctgaacctatctaagctaggagtatctcccaatgccccacccttccctgctaaaaacctacacaagtcccaaatcaaagacccctggtatttaaaaagtgttgcctgaagaatgagtcattctttgagccaagacaaattgagtggtaactacactttttttgctgctacggtacatgaagtaaagtaacaacaagccggccagccaggcgatgatcagctgctgatcaggatgagatcagctgctgatcgatcgatcaggtgagtcctcctagctctccctgatctcgcggcacccccatgcccatctgcacctgcacggcgtctgaccaccgcgctggtgaccggtcgctgctgttcgacgacgacattgcctccgcccttgcctccctcaccatccgtagcacctccggtgtggttggccgcctcgccgggtccgccaccacgcaggccgccgcaatgctgatcagcgcaccgagcttctcctccgtgccgccagcggacgcggactccccgccggactccgtctcttcctcacgcactgcccgcacccagctcgggatgtcatcgctgtgcatctccatcaggtcctggaacggcgccttcccggtgagcagctccaggaggagcacgccgaagctgtacacgtcggacgccggcgtgaaggcatgggcggtgcgagtttccggcgctcggtataggacggacgtggaggaggcgagatcggcgtgggaggggagcagcgtgggcaccagaccgtaatcggtgaggcacgattcgaagtcggggccgaggaggacgttggagggcttgaggttgccgtgcacgatgccagccggcggcgactggtgcaggtgcaccagcccggcggcgacatcctccgcgatcttcatgcacgacgtccagtgcaggggcttccccttgctcgacgtccggctgctggaccctattgtgcatcataaatttgaatttggttaaactttattccattaacacggcatggctttttacctacaaaatggattaaaatacatgctctacatttaaaaaggatgtacacagcacagataaggcttgcaaattgcaaatgcaccatgaaacaaactttcaacaatccaaacaaaataggaaaaaaaaaactttcaacaggcatagcccgcgcttgtctgtgactgtgtgtgtgagggcatggcgctatgcagcattgtccgattgcctagtctcttgttcatacgcagaacggcagaagtatactagtagcaattatttactgcagctcagattcagatcaggaccacatgctcacaagcacttacctgcttgtctacatctgcatactgttgtccttgtgagaaggggattttgatgagagcctgaaatagaggaaagaccaagccacagtggtgctgcggggtctactgcctcagatcaagccacccattacaactttacaagaacagggataggccctgttctgtcgtgcatgaaagcatggcctttgactgcctcaactaatctgggggctttaagtttgcttgtgaatgaatgagtgactgcatgcatgcccattatggtggatggaatatttcaatgcagagtgtagtgaccaattgaccattgacccactgctttaaccaaaccaatattaggccaggtttagatggcaaaaatttttgttttggggtgccacatcggatatatggatacacatttgaacatttgaagtattaaacgttgtctaataacaaaccaaattacagattccgccaagaaactgcgagacgaatttattaagcataattaatccatcattaccaaatgtttactgtagcaccacattgtcaaatcatggcgtaattaggcttaaaagatttgtctcacaatttacacgcaaactatgtaattggtttttttgtccacatttaatactccatacatgtgtccaaacattcgatgtgatgggtgaaaagtttttgttttgggaactaaaccgggcctcagtactgctaataccaagttggtaaaaagttcagcgcatggatagaatggcagcagtacagaggaatgcatttttacttgcaagaaatgaaaactagtgcagctcagtgacacatgaacggaaccagccatgttgatgcacagttggctctgactatctgttcctattatccagagcagttagtataattaacttttcatatgatatgctctatcatttaccaccagttttccgggtcctaaaattatgccctgttttcatgggagatgttcccaagaccctatgtggcacatattggaaggttattttcttccattgaaaacaaggagcaatttttagtcaatgggctttccattctgaaaggctgaaacagaatgaggttcttcacacccatatcctcccaccagtcaaatattatacgatgttaagacaagagaaatattcaagtgaatctggttgttctatggtgatatatccatgactagagtagtaattagcatgaagatggtttaatcttaagtgtttttcacttcacgattttcccatgatcccatcaaagtcttgaaatggttttactactagagaagagaaaagggatggcacacagttatattgcgttgtacataacatacggaagtactagctgctggtactctccaaattactcactcctcctatactacatacaggcggggcttgcatgaattaaaagtggagcagtagggatctccgtggcacatggctggcttggcattcttttctagcagcagcagcagcttgttgtaaataaaaggacgggcaaggcaggcagcacgcatgtacccaaactttatggtgaagcatgaggaggaggcgaggcgtggaattgcaacaaggcaacagccaagaaaaagcccgtcctttttactctgctagcgagggaggggaggggagtaattgcaatgcacgaaagaagcatgcatcctgactgaacaactgtaagtatttgggatgaagctagctagccaacaggaaacagaaaagatgacaaccatgaaaaacatatctgtcttgtttctttggttcgtcatggatccattgatctgtaattttttttgttttgtgatcctggccttggcaggcagcgattttgtctagtgtacatgaatgcagtgatccagtggctagtagtacttaggtaggtagatcccatttctcacttgttgtgtgcattgcattgtggagtacaaggagatagcagagctaattatggagtactaacatggatgaatgaatcgtaaaaaaaaaaagacaaataataatggtaggagtagtaattaaggtgggggagaagggaggaagaagaagaagaaggttaccgtggaggagggagaagaggctgccattggggtagtaatcgtagacgaggagtcgctcctccttggcctggaagtaggccctcagcgccaccacgtttgggtggcggaggcggcccagctcctccgctcgccgcccaagctccgccgcccccgccgccggctcccgcatgcgcttcaccgtgacgatgaacccggtctccatcaccgccttgtacgtgctgcccacctccccgcgccccagcgtctccgccgacgcccgcagcagctcctccaggctgtacatctccgccacgccgccgcagaacaccagcttcccgatcccctccctctcccacgagaactcacgaccccccctcctctccgatgccaccgacgccgacgccgacgccgacgcattgatctcctcccgaggctgagcctgcggctgctgctgctgctgctcttcttcctcctctggcattgctcccttatccacgtcgccggccacgcgcttgttcctcccgcgccgcgacgccatcaccgccgccgccaccaggattcccagtaccaccacacccgccaccgtcgcgccggccacgatgcccgcgttcttcgcgcggcggctcctgttggagcgtggcggggggagcggcgtgaatgcggccgcggccgccggcgcggtcggagcggcgcattggatgcgcagcggtgggccgcagaggtcggcattggcgaggaaggacgatgcgttgaatttggtggcgaggacggaggggatctcgccggagaggcggttggcggagacgttgagcagccggagcgtgggctgcggcagcggagggaggatgccgttgaggcggttgtcgtcaaggaggagcgaggtgagccgcgggagcgtggtgagggaggtggggatttcgccatggaggaggttggaggagaggacgaggacggtggcgcggtggaggagggcgagggtgggcgggatgcggccctggaggcggttggcggagaggtagagcagcttgaggttagggagggcggcggggagggcgtcggggatggggccggtgagggcgttggacttgaggctgaggacgcgcagctcggagagcggggcgaggagggtggcggtgaggacgccggtgaggttgaggttctcgaggacgagcttggtgaccctcctgtcccggggaggttgggagcactggcgcacgccgagccaggaggagcacaaggcgggggcggtgtcgcggcgccaggggaggcggtcggagcggtcgagggcggacttgagggcgagcagcgcgtccgcgtcggaggcggcgccaaggtgagagtgagacgaccacatgaagaagaggaggaagaggaagaagaggcatggcgatggcggggtgggcatggtggtggaatgaggagagctagggggcaccccgcgcgccccgtttgattaagtcctcactactgtactgtagtacttcactagctgctgctgctgctgctacagtttgtttctgcggcaatggacatgggcacatacataccacttccacttcttcttcttccctctctctctctctctctctctctctcgctctgataagagctaaacttaattaattgggaggggaaagcttaactaacaaagggaagcgggggacgggtgcgggtttaaatgctggagctcgcgttgcggtcgccatggccacgctgctctggagcacgtgaaggaactgagcaccgaggagaggagaagactagggaagaagggaaaagatgcaggtaactgggcctttaattgttagttgggcctgggcccttcccctggctgctctgtttactaaaagtcccacaacagaacacaggacatcgatttactaaccaacacacactgttatgtttattatgtgtctttactactgtactatctcctttttaattatattttctaaaaaaaattaacactataactatattacttataaaatagtacttcctccgtcccaaaatatagatacctagtacatgatgggatgtccagatttatatcactaggtaatatcccatcctatactagttagctacattttgaaattgcagaagtatctttttacgacaaacttactaacacgatgacttgtatgatttaacaatttaggccatttccaatccaagacattagacatagtttccataagctccacatcattaagaaactagtactagacactactcttccaatacaaacatcactattacatacttaaatttaatgctacttatctcatatgatgtcttggatgttgtgtacaaaccatgtctcatgcaaaatatggtttccttctattttctcatttattcacttgccatatcaattttcattctaggtggcaacttatttaatgttatggacaccatcctaatcattgggttaggaatggccttagagcaagtataatagtgagctataagcctactataaacttagggaggagagaggtagtgaaaaatcaagggtgttggctcttatgcaagagctagcttatcacaagatccaagacaaatacattaaatgcataattaagagatagagagaggagaagaaaatattgtagccaaccttatagctaatctattatatatattggctttaagatgggctaataataggaagtgagctctaccattatccttactcttagagcaagtgcaacaagaataaatgaatcagcttctacttaagggcatgttcactttatgccattttcaactttaccaaattttagcattaccaaaattttggtaacttcttatatagttactaaaatttgacagcaaactaaatgtagtcacttttttttaacaattttaccaaatttgataagtttgaaaatgacaacaaagtgaacagcccctaagtatgccaaaggaatgtagctcaactgtttcgacaacggggtttaagcgttagacttcgcatttatgctcaggtttacagctattttttaagtgatgatggacataccagccaacgtttctagagtgggtacttgtgcgtttgaatagcatttgtataggtaaaagttatatttaagttttttacttactagtacaatttagtaacaattttatttatattaagtaccatatttactccatccgttctataatattatttatttatataatattatttatttatattactatattatggaagagagggagtgctagtataatagtataatacggagtgactacagtggaatatactactactccatagtcaaagatatgcctgcatactcgtttcctcggggttctccaaagcctggcattaatttctgtgcttctgtcctcctgtgctccactccaggtctccagtactcccagtggagtattgaccgaccaccaccaccaccaccccatcccctcccctgcactcggtgctggagtaggagattcttctcgtgagtttattttcacctccgagcaaggttagccaatagtatgacaacgtatcctatgcacacactacctatgaatctatgatgcactcatgcactcagccaccgtagacccttcgattccaatccaacagatacaaatctaggtgcggcatttttgcagaaaaccgcccgcattattcacccaaatttacaggtaaacccctcgcttgctttcctcttctctagttcaaccttctccccagatcgatccccaattctctcgaggtaggactgggcgacggcagcatccccaatcgccccgttgatgcacgcgctgccttcttgttgaggtgcctgcatcatggccaccgacggttgcgtatccatccacacacagctgaatgttgagatggcctagctcaagcagggtcacggcccggctgacctccaagcagtgaccttgccgatggaggaggagaccagtgtccaatcgatgacaaaaacaagaagagaaattgatccagatcacaattcaattttcagcaatatttcactgtcaccagtgttttgcaatttctgtaagagagggaacagtctaacaatatcaatatattttacaccagatgctatattgacatctgaatccatgacaatagcacaaaacgactgttcgcagccagttaacacaaaacgccgcacctcaaattatgtataagacttgaatggagaaatcaaaacaaaatcttttgcattcagttaacagcaaagaagaaaaagagaaccataagccatcgattcatcctaattgatcatccttgacccaatcaaacatcgtgtgctaatgacctgaagagaaacaccctaaatgcgctgcatgccgtcagcgcgagccccgccgttgtgacgaccaccaccaccacgcctatatagctggcaaaaccaggccacgagcagagaacaaccatgtggctgcgagatacagcgcttggacagggcgccggacggccaccgcttgctcaccagcctcgataggaggacgcgcatgtaggcgagggcgattggagatgccaccgtcgcccagcacgaagaggattggggatcgatctggggagaagaatgaacaagagaggagaaaagcaagcgagggggttacctgtaaatttaggtgtaggatgcgggcggttttctgcaaaaatgctcacctaagatttgtatccgttggatagaaatcggagggtctatggaggctgagtgcatgagtgcatcataggtagcgtgtgcataggatatgttgcctaatagtatagccgattattagctccaatttatttatagttaatctaataaccaatcatataataattgtttactacactattagtatatggtcccacctgttatatacacattgcgtcttggagtctgtgctgcagctggctacaaatatgtagcccgttgttattctctctcatcttttatctcattaaaatattttcgtagctggctaataatttgctattgtacctgctctcagcccaccagctttcaaaagatttcatcctaatagtatcgtttggttatttacctgcagaagtattagcggaagtacaacaatcaacagactatagttggctctacgtccacgtaatgctaccttgtaatttttatccatattcactgcattagaaactatcacaaagagtacataaaaggggaagatacaaaattcattggctgccggatagatgaaagtcgtgcataggtatagtaagtgactgtttgacacacctcgagctccagctccacttcttctagagctagagcccagctagacagttttagcttcacctataaatggaagtgaagctctctcataaaatgaactaaatatgtaaagttaggtttaggtagcttcacaactttattttagacataatttttggagttaaatttaggagttctaccaacggatcccaagtaacaaatgattgctgattaatgtacaagctaggcttttgatgggatggattgtcttgtatggatatgtaggaaagggtgctcctagatgtgtgtgtttgggggtggtttaactctgaaagcttaatacttcctctgtttcacaatgtaagactttccagcattgcccatatacatgaatctagacacatgtatgtggacaatgctagaaagtcttacatcgtgaaacggaggaagtaagatttatcattgtggctgctaaaataaatcaattggtaaagatatactatgagcaaagtatcaaataaaataatctatgttagatttaaatttactactctctctatcataaaatataacattttttattgaatgggacacatcgtagtacaataaatttgaataggagtatatccagattcgttgtactaggatatgtctcatccagtacaaggctggtatattttgggacggagggagcactctactacaaccacacagctagtagtagtagtatgtatggtaacggtgcccgtcaccgtcagccaaaactcgactgcacagtaagcagcaggcagtccactgtgtgaaaatcggcccactaggcacatgtcggcccgtcatcgatgcacgaagaataggcccttcaggcccgtttactattatttttcacttctctctgccttccttgtcctcggctcttgctgacaaaacactggatctggaccaatacttctcttactttataagtttagattagatagtttcattagaatcctataattagaaaatctaataattctaaattgttaggcacgtgttatctatatatatacagttggaagtaagattattaaaagcagccagacaaactattctattaaagctgcgggtaaaccttttattcaaaaaaacatactacctccgtcccaaaataattgtatttctaggattcaaattttgtcccaaaataatagcaattctagagtactaattaccccatcaatcatctcttattcaaatttctctctattttaccctcaaccatcttcctagtattaaaagggagcattgatgccgaataagtggcaacaatttagtagtactccacagcacacaattattagtggagtagtattctacactgagcactggctccatttatggtgctatgccttgtacactgtgctatgtctatttaggtcgtgtttagttcacaaaagtagtttggttgaaattaaaatgatgtgacggaaaagttggaagcttgtgtgtgtaggaaagttttgatgggatggaaaagttggaagtttaaagaaaaattttgcaactaaacacggccttagctttgaaatgtagtgataactatttttataaatcaaattgagtattactacttgatacggagtacgtctcttgatataattattcaagttaatataattattcgagagaatatctattttggtcacttgggttccagtaaagagtgcattcttgatgatgcgtgattgatgaaatcgagcttatggcaattattcgagaacatagacgataaagttgatgggttaagaaatgctaatgaagaaagtttttacaaaattattgtaagagcttaaaaaacatgcctatgatatcacgtgattcataagtataaaaaattcaccgctttagttcatgttatatcaaacacacccttcgtatctagtaccgctctaatgcaagtgtgtgcgcgcatagcccgtgtagacacgtacgcacgtgcgcatttctcctttcaacccaagtttttggtttatgagctacatgcaactcatcaacctaacaccttactattttcttattaagattcagattttatctcagttccgattagcacacttttcaaactactaaacggtacgtttcgtgtgataactttataaacagaagttactttaaaatatcaaatatatacatttgtcaagtttataataattaaaacttaattaatcatgtgctagtggcttctcgttttacgtgcgcaaacttcatattcgttttcatcagttttaaacaccacatatagaatttttgtatgcataaaacttttatataaaaactttatacctgtagggaaactatatacatatacatatacatgaaatatatataaactttatacataaataatattaaagtgtaaatatttttacatagaaatatttaaatgaaaaaggtcagaaggcaaaaggagcatattttgggccgcaagcacgcatgcaactatttggatttagtaaaaaaaccacacgatgtgaggtgtaaaatggaatgttgacccgattcgaaaacaaattaggcaaaaatagaaaggcacgacgcgcattagcattttcaccgtatttgtcatttgtttcaaaggcaaaaaaataaatgctcaacatcaaatatggagattatatataaaaatgaaattataccctcaaatatgtcatggaaaaactaaaaggctagcgaaagttgtacccagacagctgctacataagctaaaccaaattcatagtatcatagtagatttttcaaaaataaaaagagaatatttttcctttcctttctttttttatgtttgaaagagggtgggcatagtaataccttttctttttgagaaaaccaaaataattttgatggcaacgatgggtattgggcgtgtttgcccccatataacacgatctcgatgactattttgattgaaagaatgagcttggaggatctatttgaacaaatggcctcaagtcgaaattagaaggagcactccttttatcccgattatagatcatgttttttttaaaaaaaaatctttatgtgtaaattttctagagtactttttttaaaaataactcttcaacttagtacaatagttaatacatttgttgatatatatataaaaaatcagataatccaccattcagttgaaaatggctaaagtctaaaatggcaattttatgtaaaagtagttgtttttatggaatgcattaataatgccacctgcaagttaaaattaaaataaaagaaacatagttagggacatttgagaaaaaacattgcatgtattaaagtaggagaatgagaagggaaggaaaatgcagtaaataataagcaggtaacctgttgatgacgcctaaacagttggtgcttggtgcctggtaaagaggaggaagaagaagaagaaagaagaggaaggggacaccacaccacaggtagcactcgaggagaggagaggagaggcgaggcagaaggaggcagaaggaggaagaggcggcagcagcatcggcgggaggctggctccggcgcgagcacaagctggctaccccacgctcctcccaccacctcagcacctccgcggcgcttgcagccgcgggggtctccgtctcctacccaccgcccctgccccccactccgcccagtgcggcgcccacggcgcccgacatgggcgccggcggcgccgccaagcagatcgtcgactcgctcctcgcccgcttcctcccgctcgcccgccgccgcatcgagaccgcgcaggcacaggtaactcctctcctctctcctctcgcctcgcctcgcccggaattccatcaccagattggggcctgcctcttccctccctcacggataaacaacgggatcgggacggactcacctccttccttcctagggttcaccccccttccagatcgcccttccggttccggctccacactctgatttgttttatttctttccttcaccctcttcatctcactggagccccaattcactcctcgaattggatcgattgcaggtgcaccacctcttccaaccgcttaggcctagggatttcccccataccctatgttcaaagtacaattgctctatgctgccgcttctatcagtgctccaaatcattgccatcccaccattgttattactgctacttccttctctatgaaactgcctcctcatgcgtgtccatttgaatttgatttgcttgtgctgcgacatgcccacattgttgaaaaatgctcaaaatcgtactccacctttgatggtctcgttactttcacatgtgtgctccacctataatactgggtcatgtttccaagagcacgatgatgtttctctcaatactacttagctcaactgcatggaggaacctttctacctagacattctcttgttttcttgaggcattattattttacctgccagatgaacaacttcaaaattgattactagcttatatcatcagggcaaatgttattactattacagaaaatacatctgacactaaatttctttatttttgaaaatgcataggatgggcaatacctccgtccatctgatccaagctatgagcaagtattggattcacttgccatggttgctaggcacacacctttgcctcttttggaagctcttcttcggtggagggaaaggtatgcttattcaccttgactttgaaagctctagccctatcccttaatgcttccccgaaatcattattgaacaatgcaaatatgcaatgagttctctgcactcccttatttattactgaactactgttcttcactgtcgcacagtgaatcaccaaaaggcgcacatgacgcatcaacgttccaaaagaaggtttgtcgttgattgcccttgccctctccttttcaagaaccacttcattttcgattgtaactaactattaagcagcatcagacaggcattcttgcacatataatttctctattatttcatagttgcaaatagttgccagcagggtatttgatccctgatctctcaaaacttttactcccatagtattttcatttgcgtactctcgtctaaaaatcctcatgtctgttttctgaccccttatccagcttgctgtcgagtgcatattctgttcagcctgcattcgttttgctgagtattgcccacaagagggaataacaggttgttataatattatattttgacttatttgcacggctactttctgatgggttggctaactagctgttttattttatctagagaaactttggattggcctggaaaattttgtatttgattggctaattaatgcagacaggtgaggcattactgccttttttttacttaggttttctcacatgataaataaaacacatccacgcctgtggtgcatcttaaatttgtttatctttggctttgcatatcatcaaaacagcacatcatgtgcaataaatatttgctttcttgtttctttcagcttgtgccaaattttgcgaaccttgtcattatgttagattttgtttcttgattgccaggaaaaaaagactttatattctttagaagttgagtttcttaccaacttctttactttctgcagggttgttagccaagtagagtatccctcgttggttgatttgcgaggtctcctcttagatcttgttgcccaacttttgggagctttatctcgtatcaggtatgctctatatttacatggaacatggataaggggtgtgtgcgaaggagggaggccatgtaaaaactgtcgcaatattatgtggcctttttttttcttgacaaggaaactgcaggggaggcccctgcagtttaattatatataatatattgaaggaaaggtttaaataaaagacatatgtgacctctttgtccatgttacttcaaattagggagggaaggaggccatgtaaaagctgctgcactgttatatgacctctttgtctatgttacttaaaattctgatgattcatacaggtttagttctgtgacggaaaggtttttcatggagcttaatagtcggcgtaatgatgcgcctctttctagaagtgattcactcagcattattaatgggatgcgctaccttaaattgggggtacgatacaaagatcgctttattattttaattttctgtgccagttcatagtgagttgacaagtatttaaagtgcatggcaatgacaatctgatttatcttggcatgctgtcttacaaaattccaaatgttctatcaggtagtatggtaccactaccatgcttcagttacaagtccactttcactggccaaaacatgctctgatattagcactttgatgaatctgaatcatccaaagtttttacttgtgtaccactgtacatagaatcccaaaagtaccttttgatttgcagaattttaattttgttaagaaaaacatatctacatacacaagaagtaacttaactgatactctattcactccatcatctttgaaccaatgtacataacaatgccattcagtttgaattgtagttattacatacttaagaatttactttttcaggtgaagacagagggtggactgaatgcctcggtttctttcattgcaaaagcaaatcctctaaatcgtcctcccaacaaaagaaagagtgaactgcaacatgctttgtgcaacatgctctcaagtatactggccccgcttgctgagggaggcaaacatcattggcctcctctgggtgtagaacctgcattgtcactttggtatgatgctgttgctcgaataagaggcgcgctcatgtattggatggataagcagagcaaacatattgcagtaagtcgaggatttgaaatttaatgttatacattttttggcatttgtacaaaatattgtatgccttgattattttttttgttattgaataactagcacatactttatttacttctttatttgttagcgagcatgagatattaatgatgctggactgggaattcggaaattgatctgtcaaattgagattctaatggaattttctgattttatgctttgtagttgaataaggcaataaacttcactttctatcttatcatcttggtgactgtattatttccttttttagacatcattaattactgatgccttgtgcaattttaatatttagtgctgaatcttcatcacaggttggatttccacttgtaactcttctactttgccttggtgattcccatacgttcaacactcacttttctcaacatatggagatcttgtataagtatctcaaggtgattttttgtgcgcacatttgatcatatcaaaggcctatcatatttcaccacctaatattcttttaaatgctgtactcattgtactgattgtaaaccatgatcctgatttctgaaacttatattcttcctttgtgctgcatgaagcctaatgatgcttaattgcttattacgcaggacaagaatcaccgatcaatggcattagattgtcttcacaggctagtgaaattttacttaaatgtttatgcagattaccagcctagaaatcacgtgtgggactgtttagatagtgtgacctctcaattgctgaccgttttgaagaagggcttgctgacacaagatgtccagcatgataaacttgttgagttttgtgtgaccttagctgagagcaacttggattttgcaatgaatcatatgatcctcgagttgttaaaaccagatagtttaagtgaagcaaaggttgttggtcttagggctttgcttgagatagttgtgtctccatctaacaaacaaattggattggatgtcttccaaggtaacacggttttatgaactgttccattctgtttaatcttaaatattttctgaaaatattgtaatcagtatttttactctttaatttcagaatatggtattgggcattatattccaaaagtaaagtcggcgattgagtcgattttacgatcttgtaacaaggcatatagcttagcccttcttacatcatcgaaagctactataggtatgctgctacttctcattgtacaaggaaatattcaaattattttctattacttttgtcaatttattttcattcatctttggaaactatcgatacttaaaattgtgtcacgtgatgcaaatactcattcaactttctattttcccctttatttcattatttctaacattggtattttcagataatgtaacaaaggataaatctcagggatcactcttcagatctgtgctgaaatgtataccatacttaatagaagaggtgggacgtaatgataaaatgaccgagattatacctcagcatggtataagtattgaccctggtgttcgtgaagaagcagtgcaagtgttgaacaggattgtacgatgcttgccgaatcgtcgctttgctgtattgaaaggaatggccaactttatcctaaaacttcctgatgagttccctcttttgattcaaacatcactgggacgattagtagagctcatgcgcttgtggagagtatgcctatctgaggaacttttggcaaaagacatgcaaaatgttaagcgttctagtctaggaggcgatgcactacagaggtctccttttcatagatccagggatgtatctgaattccgtgcctcggaaatggatgcagttggtcttgtctttctcagctctgctgatgttcaaataaggcttactgctttggagttattgcgatgtgttcgagcgctaaaaaatgaactcagggattactcggcaaatgaatggggtgacagcaaactgaagcttgaaccagaacctatatttattattgacatcatagaggaaaatggggttagtttttttatatatttttctgtttgtttggatttaagtttctttgacctggactgtttgaaatgaagtagttttgctgggaagaaaagaaagtaaatgttttcagccctccaaaattcctgtcccagttgggccttaagaatatctttggcttctaatgttatcattgaactgtttcccatgcttgatgactatctgtctacataaatccacaggaagacatagttcaaagctgttactgggatcctgggcgaccttatgatctgaggcgcgagatggatcctgttcccttggatgtgactcttcaatccattttagagagcgcagataaaagcagatgggcccgttacctcagcgagattgtcaaatatgcagctgaactttgcccaagctctgtgcaggatgcaaggcaaggactctgggggtttcctgaaatctttctgtgtattatgacttactttgtgtcaagcctcccttttattcccctccaatagcaatcctgactttccgttgttgaattcaaattaggcagtgtcttcactgcagtatgtaagtactacactaaattggcacttaaccagaagctcgtaatatgaatacaattatgtgtcattgggatgttagagatctccatatagatggactgatggaagttgactagctgagagactagagacatttaacagagatgcacacccttaattggtttattcattaaccttaactcaaaatatgtagctttctatggattgggtacattaagtcatcttccagttgattgcctatttctctaagagccgcattttacatgcacctttgctattttgctaggtctcaatttctagacagtggtgctctctgcattcatttgataattttgggcatcttataattgactttatttcatgactccgcagattagaggttgttaggagattagaacagatcactccggtcgaactaggtggaaaggcacaacaatcacaggatactgaaactaagctcgatcaatggctgatatatgcaatgtttgcatgttcttgcccacctgatagcagagaagaatttgccctcagagcagccagagagatcttccatatagttttcccatcactgcgccatggttccgaatcatatgctgtaagtcatgtggttatatatttccaaatgtttaacttgccttgcatatgaccatacacaattgcatgtttattatagcttgttcctcattctgtctgttaacattccaaatgttctgaatcaaattaacattccaaatgtttcctttttttttttcgttgattgtttttttcttttgcacaaaatctgatttgttgaactgaaacccccaacactcaattgataacattggtaaaatcttttctgattttgtaatgtttatttgaaatgaaaactaatgttttctaaaggttggaattgtagtatacttgcattacttatagctttgagtgcacaggatatgcaaagtacagtttttgccataagtcatatgaactaaatgatgcctggcatgcccgtgcaatattgacatgaagcatttaatgaaattatgcaagcgccttagactagcatgcttaggagatagtgagctagccaaattaatgtcatttttctgtgtagcggttttccactaaatatttagtttcagcattggttagttgattatggataaagcactctaattgttttatcttttgcggtgttttctgtatctacagcttgctgctacagctgcccttgggcactcacatctggaagtatgtgaaatcatgtttggtgaacttacatctttccttgaggatgtatcatcagaaacagaagcaaaaccaaaatggaaggtacagcagatttactttgttccaatgggcactatatcagttcagtgaattagtccacactttctctgctgtggccatcttcatttaaggaagggcatttattgcatagatctttccatatttctggaaaaactgacttttgtttttcacctaaaatacccagcctaattcaaccaaactgatcactaatccatggttttaagctatcatcccagtttcactagcttatttttgtatcgacagatcttattgatctctctctatttcttaatatacctttgagactgtgacttggtagcaactgcttaacctgtatatttgtaattcacatgtctattttccatggtagcctctttacacaattttccacaagaaggtactttgccacttttataaatctccaagtactccatccggtcaggaatacttgtagttttagacatactttcacgtcgaactttagaaactttgaatatcattatctttttacattcttaaattggatataggagaaccatgtatgtagatttgtctcagagagtactttcatgacatggaaatttattgtgttatataaacataacatattatattctcagtggtcaaagttacacttgtaagactgtgttgatgtccaaaacaggaagtatttgtgaccagagggagtaaacctttcattcatttcctcaaataatttgaaattggtagtgctagcagtgaccaaatgtgtttttccctgcagaatcctaggtcccgccgtgaggatctgcgtacgcatgtcgcaaacatacatagaatgatagctgagaagatttggcctggaatgcttagtcgaaaacctgttctccgtttacattttctaaagttcattgatgaaacatgccgccagatcctgccaccatctgataactttcaagatttgcagcctctccgatatgcactagcatctgttctgagatatctagctccagaatttattgatgcaaagtctgagaggttcgacagcagattgcgtaagaggctttttgacctcctccttagctggagtgatgattctggcagcacttggggacaggaaggcaacagtgactatcgccgtgaaattgagcgatataaagctagccagcataataggtcaagggaatcacttgacaaacttgcatttgacagggaaatggctgagcagttggaagctatcaattgggcttcaatgaatgccattgcttctttactatatggtccatgctttgatgataatgcaaggaaactgagtggtcgggtaatatcgtggatcaatagtttgttcatggaactagctccaagagcaccttttgggcattcaccagttgatccccgaacgccatcatattcaaagcacactgatgggggacgttttggaggaagggacaaacagaaaactagtcacttgcgagttctgttagcaaaaactgcattgaagaatattttacagacaaatttggatctgtttcctgcttgcatagatcaggtaagttttgcttcttctatgaacaagccaactatttgcgttgtatttatattacattgaatagcatttgtttaattaattactcatggtgacttttcttctcaaagtagctcatttaatttggtggtatgctattagttactactttcatcctgcataacttaggattacgccatttcctttttatcccctctaatcatccttgtttttcttcttgaagaaattcatccccttttagcaaggttagggatgcttcatatcacaataacagtttcttgaattaaaaagttctcaagctcttctcacttctcagcatccttatgttgacagtttaatttgtgcttgccatcacctgttaaatttcgactatacctatcatttgcagtgttactctccagattctccaatatcagatgggtatttcagtgtccttgctgaagtatacatgcgtcaggaaattccaaagtgtgagatccagagaattttgagcttgatcctctacaaggtggttgatcaaacaaaactgatccgtgatagtgcccttcaaatgttggagacactctctctccgtgaatgggcggaagatgatgctgatggtgttgggcattaccgggcttctgttgttggcaacctgccagattcctaccagcaattccagtacaagttgtcctcaaagcttgccaaggaccatcctgagctcagtgagcatctatgcgaggaaatcatgcagcgccagcttgatgcagtggatattattgctcaacatcaggtcctcacatgcatggctccttggatagagaatctcaactttgttagactaaaagaatctggttggagtgagagattgctgaaaagtctttattatgtgacgtggaagcatggtgatcagttccctgatgagattgagaaattgtggagcaccgttgcaagcaatactcgtaatatcattcctgttctcaacttcttgatcaccagagggattgaggattgtgatgccaatccatcagcagagattactggtgcatttgctacctacttttcagttgccaagcgtgttagtctgtatcttgctcggatttgcccacaacagaccatcgatcacttggtctgtgagttatctcagagaatgcttgaggatgatgaggaaccagtcaggcctggaaaggttgatacttctgcaaatgtcgtgttagagttttctcaaggacctagtacctcccaggtggcaacaatagttgatagccagcctcacatgtcccccctgcttgtccgtggttccctcgatggtgcaatcaggaatgttagcggaaacctaagctggcggacatcagcagttactggtcgaagtgtatctggcccactgagcccattggctcctgaagtaagcattccaaaccccactacaggccggtcaggccagctccttccagcattaatgaacatgtcagggccattgataggtgtccgaagttcagctggaaatctgaggagccgtcatgtttccagagacagtggtgattactacttagataccccaaactcaaatgatgatattttacatcaaggtggcagtggtgttcatggtatcaatgccaatgagctccaatctgcattgcaggggcaccagcacttgctttcacgtgctgatatagctttgattctccttgctgaaatcgcatatgaaaatgatgaggactttcgcgaaaacttaccactattgttccatgtcacctgtgtttccatggatagttctgaagacattgtgcttgagcattgccaggatttgcttgtgaatctcctctattcactcgctggacgccatcttgaactgtatgaggttgaaagcagcgaacgggagaataagcagcatgtcgtgagtttgataaaatacattcaatctaaaagaggtagcctgatgtgggagaatgaggatcctacccttgttcggactgaactacctagcgcttcactcttatcagcacttgtgcaaagcatggttagtgcaattttcttccaaggtgatcttcgtgaaacctggggttctgaagcacttaagtgggctatggagtgcacatctcgtcacttggcatgtcggtcacaccagatatatcgtgctttacgccccagtgttaaaagcgatagctgtgtattgcttatgaggtgcatccacagatgcttgggtaaccctgttccagctgttctgggttttgcaatggagatattgttgactcttcaagtcatggttgagaacatggaacctgagaaggtgatactttacccacagctcttctggggctgtgttgcactgatgcataccgattatgtgcacatatattgccaggtgcttgaattgttctgtagggtaatcgatcgcttgacgttccgtgatcggacaactgaaaatgtgttactgtccagcatgccacgtgatgagtttgacatcaatgggtatacaagcgacctccacaggctggaatcgagaaccacgtcagagagattgctatccgtgacagagactgggaaagttcctgatttcgaaggggtgcagccattggtgctgaaagggcttatgtctagtgttagccatggatctgcaattgaggtgttatctaggattaccatcccaacatgtgattctatatttgggagtcctgagacaaggctgttgatgcacatcacaggtcttcttccatggcttgggttgcagctcaccaaagatgcatcttccctcgggtcatcttcacctatacaagagcagaatcagaaagcttactatgtggcatccaacatttcggtgtggtgccgtgtcaaatctttagatgatttagcggaagtcttcagagcatactcctttggagaaatcatctccctagaagatctttttgcacgcgcttcgccgccaatatgttccgagtggttccctaagcactcatctctggcatttgggcacctgcttaggctccttgagagaggtcctctggattatcagagagtggtgcttctgatgcttaaatcactgttgcagcaaaccccagtggatccatctcagatacctcaagtgtacaatgttgtgtcacagctcgtggagagcgcactatgtgcagaggcattgaatgtgttggaggcgctcctacggagctgcagcggtgtaactggtggtcaaggtgatgatattggatttggcgagaatggtcacgggatgggggagaaggttcaccaaagcatgcttcttcctcaatcatcattcaaggctaggagtggacctcttcaatatgctgctgccggttcagggtttgggactctaatggggcaaggcggtggcagcgctgcagatactggagtggccacccgagatgtggcgctgcagaatacccggttgctgcttgggcgtgtccttgatacatgcgctcttgggcgtaagagggatcataagcgccttgtgccgtttgtggcgaacatcgggtagaaaatgcagttgagtgacctatgtaaaatgtttggtggctatatgtgctaactgaatgaatgaatgcagccaattttgtacagctaggagcgtgatccagaaatcgctgtgcacaggttgacaagatagaagaagcagcacttcccgccaccgaaagactaccctaaccaaactcaattttgactgttgtaatatcggaatgtgtttatttatcctgcaacctcacagaggtcgcaggtttgaagtatggttgtagctgtagactgcaattcattggatgcacatacacatacatacagcatgagcgagtggcacaagctcttttcttttctttttttcttggctagtgtgtatattggaattgcttggtgacatcccgaaggggaagggactccagtgtagtgtttgattcattattattgttacctgttgtgttcatttatgcacggagacgatgtaatctgtttgatgtcgctaccgtagagtcgaaacatctctcgaacaatctaattcaccattcatcgtgagaagctgttattccagaaattttgtcagctgtttatgatgccctgttcagaaattttatacctatcacatcaaatatttggacatctgtatgaagtattaaatataggctaaaaaataactaattgcacatatctcgatactaatttgtgagacgaatcttttaaatctaattgctccatgacttaataatgtggtactagtaaacatttgctaatgacgaattaattaggcttaataaattcgtcttatggtttactgacagattctgtgattagtttttttattattgtctaaacgatacgccaaaatttgacacctctagctctataaatacggaccggtaccgttaagtggttacttctggtactggagtttgtaaagcctgtataggcatattcatccctttttttgacaaattgacccttttggaaaacttatttcgaaactaacctctgccaaaaacttcaaccaaaaataggccgtcgcctcagcgccaaacacattggcgctgacgttggccgtgtcagcgccaacgggactggcgctgacattgtgctaccgtggcggccgggccgatctccagctgacgtggcagctacctcagcgccaaccggactggcgctgaggtgggacttggccgcaacccccaaggcccagaccagcaagcctgctggatggcttgcgggctgggacctcagcgccagccataatggcgctgaccgtgggatactcagcgccagcccacctggcgctgaggtgggacttggccgcaacccccaaggcccagaccagcaagcctgctggatggcttgcgggctgggacctcagcgccagccataatggcgctgacagtgggacactcagcgccagcccacctggcgctgaggtgggacttggccgcaacccccaaggcccagaccagcaagcctgctggatggcttgcgggctggcacctcagcgccagccataatggcgctgacagtgggacactcagcgccagcccacctggcgctgaggtgggacttggccgcaacccccaaggcccagaccagcaagcctgctggatggcttgcgggctgggacctcagcgccagccataatggcgctgactgttggaaactcagcgccagcccacctggcgctgaggtgggacttggccgtttcggccgtggcccagcccagcaagccttctggatggctgggctgggacctcagcgccaggtgcactggcgctgagtttggacatgtcagcgccatttagcatggcgctgacgtcccagccctgctaaactttagcaaaactttgcacacaacagaggcaaacatcaaatcacagaaatttacaggcagtaatatatccagagaaccatacaaaacatacatccatccatcaatcccaacatcattccatacatccatagaatccatcaatacatccatatatgaagtccatatatataagaaataaaagcatcccatcgatcctcgtctatacatccagtcgagtccatacatccagtccatacatccatcgaaccatgcatcaagtccatccatctatccatccatccattgaaccatgcactcacctcctcctacctctagtgcgaggacgaggcacgtcgggggtgtacctctagtcctgcgaaggagcccgccggcgtcgtggtcgagacgggccgggctgcgagatatccggctgtgacgactctggtgcgtcctctagctgcgagggaccgagctcatccgcctcctcttctctgtcctcatccccttcttcctcctcatctccttcctccgcctctttgtcttgctcgccctcctcgtcacccacctccccttcttcatccccctcttggtgggcatgagcatgttcgaccacatcagtcgacctgcagccgagccttgctgccaacttccgacatcgctaccgtagtctctgcataaaaaataatccatgttaagttatcgcttttggaagaaaacaccgtagtttcatctctttccaacgattacctgtagggcgttgcggagggtgccgccctctccttcggagccaggagccgtgcctagcgccactcccgcgtcgttgacggtccgcaagagctctcgagcctgtaggattgaaatgaagtaagtcacaacatatatggcattgaaatgaaataatatacaacattaatgctagaaactaaccactctgtcgcgaacaggtcccgtctcgaccgtggtacctagacgggtacgagtatcgtactcgttctgctcctcaacatcctcggggtcatccgctatgtcggctagtgtccaagccggacgtaggacaagacggtaggtcctgtggagccacgccaagtacaagtcgaactccgtcccgttgtgctgaccctggtctggtactccattctcctcgaacttctcccattgcgtgatatgatcctgatggtagtaagcccaatcagtcaccttcttgttcttccgacggtccaccctgcacgtatgcaaaatgtccaactcaaatatgtagtaaatgttgaagtgactgattgggcaagcaaaataaattgttaagtgaaattactaacttgtgtaggtcgatactcgtggagaaacggtgcgggattgtttgaagcctcccgaattgccgcatcacgcggtggcacatctggaactccactgcatagaagcagatcagtgggcaccgtagggtcttcaacgcatcctctatatggcacatgggattcagttctagctcgagcacttcctgtgcctgatatggcatccacaccacctgcagcaacaaaaataaaacacattgaagcacatttagtactatatagtaagaaaccatcttcatgtgtgatagaaccccgaatagcttacatgttctggctgtaggtagtccatctcgtttgtgtagtggtagtacgccaaattcctgcggcctactactggagatggggccgattcccacaggtgagctacagtgggacgtcggtctgcatcctggtgcggccaagcctgatgggtcctccacatgggccgaccaactggaagcctcatccacatccaaacctgcgtcacatacgttagcttccaacatgttagcaagaaattgaaatgttatgaaacataacatgcgtgaacttacctgtagcaaccaaacacagcctgctaggttcgcgtccccgccttaccttcggcaagcatcacagagttgccggtacaaccaggctagggcagccgacccccagctgaaggtacccgcctcgtcccagtccgcgagcaacggcagccacatccaagaagccatgtctccaccagagtcagggaacagaatactgccgaagatgtacagcacgtacgccctgcagtatcgctgtactgtagcctcgtctgcctcagcgggacactgaccgaagttggctcgcaaccaactcaaaggaacccctgatgtcttcgtctgcctctgaccatcaggtgccactggaggctccagaccaaggtactcctcgaccctctccctccagttccccgacgctgtgtcacctgtaaccggaaattaaatggaattattagtaattgcaaaaaaattaacaaatgaatacgaagactcgttagtaattccctgacgctgtgtcacctgtgaccgcctgaccccggataggaagacccaggatcatggcgacgtcctccagagtgaccgtcagctccccgcacggtaggtggaaggtgtgtgtctctggacgccaccggtccactagggccgtcagagcagcagcgttgtacagaggcaccggtcgctgcgccatggtcacgaacgccaagagcttcgcccgccgtaggtacgggacgtaccggtcgtcgaacagtatgtgcgccgtgtgacctctgactcgaagggtcttcaagcgctgcatcaatagacaaacataataacataaagttagcgacaatatatcatatacaagggttgtggaaaatacatcatgcaactaggaactttaattttgggattgagcaagaaaactgaaaagaagatctgtgtgtttacatgctctgctttgaggctcctgaactttgatttgagatatctctatgatggatgatctatctgtacaaactaaaatcaaagaagaaaaaataaattcgatcataaaaaaaatggaatattgttgatgctaacctctccgctggcaatctgtggggcccggtgcttctcctcgtagaaatcctccaaccccggaaagtgctccatcctgcaaatgaaaatggaatcattagtaattgaaaaaatattaaatggaaaaatcacaatgagaacggaaaggaggacaacagaaagtaaacattgatgcaacaatatgaacttagcaaatgaatgtcatccaatcccacctgtgtgctaccctcaccacctccccccgtcctacggcgctttttcggtcgatccttagacttgtctcgcttcgggcacctagttttcttatggcctagttcgtggcatagcgagcatctattttgcatgaccggctctgaatttgtattgttcggcttttgtgaccgtcggttggctgagcctttgtatgctttgtccatatcgttcttgaaccttcttgtccttcttcttcctcgtgtgttgttctttaatgacaagtcgggcacgaagaactctccatcataacttggccactgcgatggatctaggtaaggttcaaacctaggggagtacgagtcctgcacagccttattggaagcttcataacacattcggggggccacctccacatccaaacctcgcaacttacaaacggttatcatgtgggagcatggcaagtgatggagctgagggaactgacaactacatgtgttatctctcgcaaccacgacgtagtgacgtccaccccattgaaccccagccgccgtgactccgccttgctcgctgacctcatacttcatcgaagggaaatcaaaacatgctgctctttgccccaaggttcgtctttgctgctcctccaacatgtccttaacttttgtgggccacttctttccacacaggatatctacagttgcctctttgtgtctatcgacaaaccaactattgcactttgaaaatgtgtatgccacaatagctgtaaccggcagtttccgaatgcctctcaatacattattgaaactctcggccatattactagtcatgatgctatgacgacgcccgttggtatcaaatgctcttgcccatttgaccttaagtggcatatggtcttctagccacttctttggcctctctccgaccacacccatgaggcgttttatctcatctaggaacaatgctttctcatttatttgacatatgcgctcaagatctttcatctgatcagtcgtagctccagctgtgtagaagttagcacagaagtgcctcatgcaccacctgtggtgaatggttaggtgatgaggcatgatgtggatgatggagttcaaaatgccagggtgtctatcagaaattatacacacttctctattaggaccgatcaacttgtttctcaacatgttgatgaaccactcccagttggatgtattctccttctctaccagagcaaacgctaagggaacaagatgtaacccggcgtcgacccctattgccgtgagcaatgtaccttggtatttaccggttaagaaagtgccatcaattgctagcaccggcctcaagtgcttgaatgcttctatggactggccaaatatccaatatgcacgtccaaatactcgcctctgtactccatccaccatcctggacttctcgggatgagcctcaacacggaaatgcatggtagggttctttgctttgatggcacgcatcagtgtaggcaagcgaacatacgcctcgtcccaatctccccaaatgaccttcatagcaacttgcttagcacgccatgctttgccatacgtaggccgatagtgccatatttgctcaactgcctcgacaatcgctgttggagataaagttggttcagctcgcacaaatgcctgtaacctgtttccaataaaccttgaagtaagttgcaaatgcttgccggttacttccgcactacagcatgtgtggtcttcgcccaccctagtcacccgccacctatctcctccactcttccttgcattaatctgccatttgcaatggcgatcgagacaagccacagtatactttactgacgcgttagattccttcacatggtacggccggtggacacggatagaataactctgtagccatattttcagatcatccatcgatcgaaactccaaccccttccttggttcatcacacattggttcgaaggcaccgtcatattgtggatccccatcagcaattgctagcccagatctggtaagatcctcgaattgtgttatttccgggtttctacccaccagtttcgcaaacacagtcctttcatgctctgacatcttacgcactggacgatcatcatcggagtcggaagcggactcatccaattcatcctctgtatcatactccaaccagcctgggttcaatccactgcgtatcatagcctcctcacactcctctcgggtatagaatttcagcctagccaactcccttaggcccatacttacattcttagcattcgcttcttcctcaggcaactccacatcatctcctacctcccgaccatcctcaacatctccttcctctcttaccggcacattctcctccacattaacttcctcccttaacggcacattgtcctctgcatgtacttcttcccttaacggcacattctcctctgcatgtacttcctcccttaccgggtcattctcttccctgacctccacatccgccatatcatttactccctcgcccccctccacgtcttcctcaatcaattcttccttcctactacacctctccgacagttcgtgacagctaatgggtgattctataagttctttcttccctatcctaccatctttcttccatgcaaacacctcaagagatttgaaatgtgaccccaatactatatctatatatgtttgccattcgatctctccattcaagtctaacataaatttatgtgacatgacaccgccgcccacatcgtatctcccttgcataccaaccgactcatcattccaatccaattcatgcttgatgcgagacattaactcctcaaaggtaggcttcgcaaaaaacactaattgtctaactgtcattccctcaaattggcttccatgtgtactttcatctaccacacaaccaccataatgaagccggaccaatctatccatctacaattttaaacccatgcataaacattaattacttgaaaataatatgtaattaccattgcaataccaatacttcaaaagctaacaacatgtctaatttttccaataaataagtacattactcaaatactacacattattgataaaaaaaaactctactcctacaaattacctacccttcaccacacatcaacccctttcaaaccctctcaatcaccacaaatccatcccacatcctaggccatcaccacacatccatctcccatcaaaccctagtgcatcaccaaacatccatcccaaatatattttgtcaaatgtatcaataacaaccaaatggataaagatatgccacttccacacttcatccccacccatattatccatctaataatccatccttagccaactattatcaaaccacgtctacaaccaaaacaatgcaaaatatccaataaaactttggggaacttagggtttatagaggggtttaccttctcttccgatcccaaactcaatgtcgcacaaatcaccttcgattagagaggtttttgggggagattgggcgaggagaacgcggtggcgaccgaaccctaggcgggcggctggggaaaaaacggaggaagaactggctggggcggcctcggccgggctctaagtagccaaggtcagcgccaacttacttggcgctgaggttaggcacctcagcgccgaagcggttggcgctgaggtagctgccacgtcagctaggggatcggcccggccgccacggtggcacaatgtcagcgccagtcccgttggcgctgacacggccaacctcagcgccaatgcgcttggcgctgagccgacggcctagttttggttgaagtttttggcaggggttagtttcgaattaagtttttgaaaagggtcaatttgtcaaaaaaacggcatattcattcattcgtacttgtacgtgcggcaagcagactagagtgtgtgtcagaaattgggacccaaaggaggcaaaggtagatctggagtttctggacttacatacctatagggagggagtgactagtactccagtttgggagcaaatgtgggggaaatagcttgattgatgagctataataataagctgagagggtgaagtgcggtgcggaggcaagacgaccacataataataataagagtaacataaccaaaaagacaagcagcatctctctctcacgcgctgctgaatccatcccatccacatctcatcccatggactccgccgtgcgaccgcccgtcgacgccgaagaagcccgccgccgccggagcaccgactgcatctacttcctcgcctccccgttgacctgcaagaaggtcttgcctttcctttactttcctcctcctttcctttttcttttcatccatctttttccccccttctcctcttgctcgattacctcccgatctgccgcttctctcatctgctacacccaccccctctttcgatctgccttccctccactctatcttgatttcttttcattcccttacttttacctttgtaagtcttcttgggaaattctctcttgtagattagaaagatgctacaacagtagattcgtttgccctttcaactaattaattaattcattaattcatctgtatatatagcgtatgcgatgagatgacatgtcctcagctcgcacaaaacttgtgtttgtgctaggttttcggttctactactacttactaggctaagctcaaggccggggggggggggggtgcggtgcatggctaggatcctcatgtgctgtggtgggggacaacaaaacatttcgtcgctcttcatcacatcctttacttacctcaccatctcacctgcttattttctagctatgtgcccaatattaagacaatactccactaacccataaatatagttctcttgtcggtctctccatatgcaccttgcttcaatattcatatatgaaaacttccatttttgagtagattatcacggagtacgtcatcggttccaagccagagatttatttcatttgtcgtttctaatgcgttgcaccttactgattcattcattcttcacctgcaatgctctttaggctgtgtttagttcacattaaaattggaagtttggttgaaattggaacgatgtgatggaaagttggaagtttgtgtgtgtaggaaagttttgatgtgatggaaaagtttgaagtttgaagaattattttggaactaaacacggccttatttcaatatactgacatcatctttttcctttactcactcagggaagtgaatgtgagtaccgtcatagtgatgctgccaggatgaatcctagggattgctggtattggttcaatggcaactgcgctaatcctaaatgctcattcaggcacccggtactcccttgctctccgttttttttttcttcaaccaaaactactgcaattattatatgtttagtgccactgcgaaacatgccgacactgtaagctactatataagtttctccaattagcttattcttgtggcaacaattcttgtacacaactgcacatgataatacttactcaatcaaatactacgagcaacctggggttgataactaataatcttgctcacttttcagccgttggatggcctggtcggagcacccacaacaccacgaacatctcaacaatctgcaccacaggtttctgtgcctgctcaagctcctgtgcctaatcctgccagtggcacagccaagcaaggagttccatgttattactttcaaaagggcatgtgcgtaaaaggggataggtgcgccttcttgcatttgccacaggctactggaagtcctgcccctcagcacacaacaaaggtttttgctcctgcttctgtgcctcatcctcagttgaagaactcgtggacaaaaccaaactcttctgctcagcagaatgcacctcctgccatatttgacaagcctaaggacagtgctcataatggcaaaactgctcagaagcaaaatttgacaaacagggctggtcactcgtcaggaattattcatgataaaaaaggttcttatatgccatcgggtgtaacaaagaattaccgacctccaccctcaactggagacgatttagctgaaaatggtgtggagatgggtgaatttgtgagggaaccttctcctggttctgatgttcttactggtggtgctgatgacaatactgaacagtcactcagggaagaccgtggtgcttaccgtcgtactaacggggagcagcacattgggatgcttaggcaaactcatgatagttatggatttgaaaggtcacacagaggttcagctgagaaattgttgtcagagagtaggttttctcagagagaacctatgcctttgactgcagacagttcagatttgcggcaaaggctattgaagcaaagaaggctcaataatcccagatcagggcaggtctctgatagacataatgtctatcctgaggatgaacgccatgaccgtcatcgtcagcgtggtgaagagcaagcttccaatgacggcgtctcaagctctcgattgcgtggtagaataagacttccagcggaaacaacgtttgacagacttggcttacagcctgagaaagagagagacagagggcctcgagctagattgtcaccaccaagtcaaacagaccttagagggaagcttcatgataggctaaaggctaaaccaaatgaggatgtatctggtaatgtacaaagttctttgtcaaaagcaaatgaagatgctgaatcgttgaactttgctgggccaaagagccttgcagagctgaaagcaaaaaaggttgcaggcagtttaatgaagagtagtcgttctttaacagggccagttcgaatgacatccgaaatagttaccatcaaagactcttcggaccctgttctgtttgatggcccaaaaccattaaatgccatcctgaagagaaaaagagaggcagattctggaaatgctaccgattttggcagcaaacgggaagaacattctgggggagatgaagaaggatctcagaatgatttccgaaacatcgaggatgacatagttggaatgaacaccgaggggaatggagaagaagccttccaacctgaagacgatgtggtgtatggcgacagcctgtctcctgcggatgacattgctgctgaagctgcagacgatgcgagcagggagctggaggagcagcaagatgtagagacagcagaagagtacgactacgagatggatgacgttaatgcggcggaggaaaatgactaccaggagtatgaagacgaagacgatgatttggaggacgacgacgatttcgcgcgcaaagtgggtgtgatgatcacttgaagctgcgttgcagtaggcgtgccactatatatggtatgaccgaagaattgaaagatgtgttagtatccctcccaacaagatgttggtctgtttttcttgtggtgctagatacttttacttcactgcgccagagaattcagctaataaagttgggaggaagataaaattggctcatcggagagcttgtgtttcagccaagaggcggctgcttgtactctaatgtgtgggtgtgctctcctctgcctgcttgtgttgttgtatcattagttaaatcaaaatgacctaacaggttacacaatgtactacttctatttatattcatcagtgtataagatgataaaaggccttgaagccttttctttctggtagagaatacattgctcttacctccagatttaacatttcatttttcttgcttttgaattgtgtatctcatattgcaatttcgatctgtgtcgctttgctgggtcgaacacagcagacagttcattcgcgtatatttatgcacaagaaaactgtcaccctacaaatcgatgcctcagatagcaaacagacaagtcatggcgtctatttttccgtcttaaaaagtagagtaggagatgagctcaaaaaggaggacgagaagaaatttatcatctaaacatattatcttcgaatactcctacaaagtattacatacatatcaccgtataaaatctgccgtgcggtgtttacatcacctttgcagtggcttcaacaggtctttgagaggccctcgccgctgaacattcttggcctgctgtttctctgcgttgcagctgcagctgctggtgttgaggttttcgccgcagccaaggcagagacctttgcaggtgggactgcacagggcatcgagcgtgatctccaagtgaatgatgtccctgatgtgctttgagatatcaatctccttttctccagctgggaaatgcagccggtcatcccaatctatatcttcatcgtctccatcttcttggcttccggttagcgaaggagctttggtttgttcttcttcaaatatcgtgccgagatcaaccacatcaggttcctctactctgtcttcggtcagtaagagggaaaaattggcaaatataccttgaggcgctggctcagcacacctgaaaatgaagcacagtgcgtttcagtatagcactatcaaccttgtcttcaagttgtgccagaattaaattaaccaaaaaaaatagcctgtttctactttgtgaacaactcatgtattgtcaacaacgaaagtgatattcactgaatatatactagttgttacgtcaacaaaaaaaaaactagttgcttcatattcaatcctccataaacctttattatgcaattactagatatatattatattatttcaaggtttgcacacaagagcagcttagtcggacaataaatttggaaacttcccacaatggttgtgagctaaaagagaaaaatactgtattacctactgtatgagagatgaagttgagattgttgtcctaaagttttcctcctacggaatagttatttatttgtttgactaatttaacgaaaaaactcacagctagcttcaacttaaagtgaagatatgccaaatgtaacaaactagtactagctgtatggagcagtgaagtgtatttgaccggtaggcaaagtccaatccagcatggacatagaagtgaaaaattgcacaagacaaagctaaaagggtgggtaatatgatgtatttatgaacagtagtagaggtgataagttaaaaagattgttactgtacttgcctttgcctaatgaaaccaatttctttgggtcatactactgccttgtctaaaaggaaaggaaaagagaggtttacccatagcaaccgagggtgatgacagtgcggacgatgccgtcgaggcggaggcggccgcggcgcctggcaacgtcgagggagacgagcaccggggtgtcatcgtccttggtaccggtaaggttggtggaggagaggatgaggattcccatggtggcggcgcgcgcccgagagtgagtggaggagaggtcgccaaggccgaggcgctccagtgtggtggcgtactcgaggtggtgaaccgacgcgtcccgccggtacaccaccgcgccctcccacggagaaccctcctcgtcttcttctttctcctcctctgggtcgtagtcgacggtgaagaagtcgtcgtcggcggcggcggcgcatggggagtgggagagactaggagagggttgtggtcggaagaagaaggagcaggtgtggtggagtggggtcatcgccatcggcgggggaggggtgcaggtgcgagtgcggcggaggaccaagggcaaggctcctgcgacgcccccaatgccaaacccaatcatcatcatcttctccaccccccaagcttcttcttcctcctcttggtgccatcggccatcccatcctctcccgcgtgttgtagggcccatgggctgaatcatttagtaaggcccaagggatgcgccgtggtgcgcggaagtaacagcccatcgctgctcatggaaatgccagtttctccaaaagacgctatgtttataacaagtaaaaaaacaccagtaacaaaaaaaaaagcatgtactagtatctatctatctatctatctatctatctatctattatattattaaaatagctttgaataaagacaccacgttcgctgtcgaggctagttaatcgaagaaaagagaaaaaagctacaccgttagattacaatgaatataaattaaagggtgtaggtttatcagaaaaaaaaattttatcagtacgaaacaaagtctatccaatacataataggaaagttactctattatattattaaaacagctttgaataaaggcaccacgttcgctgtcgaggctagaaattctcacattaatcgaagaaaagagaaaaaagctacaccgttagattacaatgaatataaattaaagggtgtaggtttatctgaaaaaaaatttttatcagtacgaaacaaagtctatccaatacataataggaaagttactctaatctttcacgtacgtgcatacatgcatgttggattcctaatagtatttggacaaggatgctttccgattgggtgtggaaaaaaaggaaaaacaaaagatgcacagtccatggaagagtacatctagactcaaatcacttaattagccagataatcttgctgtcacgcaaaaaccaggcgcattaattcatctttgatatcaacacgtacacctacacgatagattgttggtaataattttgtagcttactaaaagttttttttctacttaaatacatatttaaggagtctgttcactatattggaactagaaaaaaaatatatgcacaattacatttgttgtttaattacgaagggtttaaatttactccattgatcatacttgaaaaaaaacatttactccaataatcatatttgaaaaattctacaccactaatattggttgatttaatttataataagttataacaaaacatatatagtatataagttaattgtataaggaaaaaatatttcttggcataatagaccaccttaacaaataataattatagacaagctagctcgaacgggaaggaaaaaaaacacagtccctgtcttcataagaatctagcactttgtgaaccctttagttgcatgccataagaaaataaagataactcacctatgtcgtaggttatagacttatagtacttaaaagaacaattttcacggaaaaccctgaacaatttccattgtgtgtattatatttagtttcctatggaggctacaaaatcccacattaatccaagaaaaagaggagaagagttcgagtaaaaatacatctagaaattattgaaattcggaataaaaaaatatggaaagaagagtccatgtagaacacaattaaagattaattaaaatttggaataaaaaatagaataaattccaaaattataaaaataagaataataagagttcaagtaagattacaattttcaaacaatagaaattggaaataaaaagaataagaaatattgaaagatttcccactatacagcacaatacaagattaatgaaaattagaaataaaaactaaaattaattcagaaattagaaaaataaaaataagagttcaactaggaatatggtttataaataactaaatttagaataaaaataaagactattgaaagaagagaccgtctagaacacattaggaagttaatgaaaatttggaataaaaaataaagtaaattctaaaaaatagaaaaataattataagtgttcaagtaggaatataatttataaatatcaaaatattggaatgaaaatatgattttttttaaaaaaaatagtccatatagaatacaacgatgagaaattgcaacaaagagaagagaagcaagcccgtaaaggagtagggtggtggcagttgatggggcataaaaaaactataaacaaaattctaaatagaatcccaatgatgattaagaggagggataacggcaagccattaagtaaccggtcacgacagttggcgggacttctacaaagtaaaaaaaaataaaccacaacgacaatcattttcgatatttaaaatctcaatgataataaaattgagaggcaccatgcgggtcgcataggaatacagtggttgagccaccaacagttggcgggtcttatagaaagtaaaaaataaactccaatgataattatgtttgattttcagaatcccaattacaataaagaggaaggcactgaacgggccgtagaagagtacaataatgatgtttgacgagacttctaaaaattataaaaaataaaacccaacgagacaataagaagtcttattttttaaagtttttaaggagaacgaataaaaaatatggtagatcgctcgagcaaataaatgggcgataaagaagtaaaagtagtgattggtgtgacttttaaaaatcaagggatgataatgttcggtctttcaaagtcctaagacaataagatagctatttagcaaattttaagtaatattatatgtaaaaaaaccgataattatgtatgaatgctagccgcgcaattgcgcgggccacccagctagttatattactagtttacaaaaagaataccctgcaacgcaaccaacgctacgcacaagtcatcatatgatagtccgtcttgtcaagatgagaggagctacaacaccattggttttggttacagggtggtggactggtgatgacgcaaaatagagtacgcatcacaaagataaagatgctatgatctcttttgtccgcccttgcgctctttccttctcttcaggcccatccagatctccaatgttgtcatgatactcctgcattggacaagcaacattactacatgaacacccacggtggtttaacacctcttctactcaggtttcagctaaaaaaaaactgatttcactttgggccaccaacacgttacacattaaaaacttacacttgcacactccatctacctttctagacaccataagcggcaaacccttacaaaatcaaaacccaatgcgcatacctcaagtatatccttaacgtcatccttagtcagtttgttctgtcttagaagcaactctattcttgttctcatctgtgaattgctgaaaatacatggcagggtcaaaaatatgagtattgcactgcacacccgacctcctaactcaacagagcaagaaacactcaagcttcacttacccagagtgccatatatgccccagaataagtgcaattaactgaaaaaaacagccacaattattatagacacttggtaaagtaaataaactaaaggatcaaccaagaaagccatacaagtaagaaaacaacactttcaagttattactatggtacctgaagtgtgtaaagaccagcttctagcttgcgattgtagcgctcatcttcatccatctgagataatgagaatgtagctataagaatttttcatctgttcaaatctgagacaaaaaatcaccgtgggggcttcccccactgtttccgggtcaaaaaaaaatctgagacgaaggcaactaggtagataaaagcacctctagatcatctaaatcaagactgtcaagtctttcagtctcagctttcactctttctgaatacctgcaaatgaatgagcaaagcatggaggataaagccaatagcagaaaaacacaagcaattttcttagttttcttcaaacgaaatataccttgtgtaaaactccatcaaacggtctatcttttcacattcattctcaacaaattttcctagtaacctgattcttcgtgaaccttttgtaataccacctaagaaaaaaaaatgcaaaacaccaaacatgaggaaataactagattaatagggtgtctgcagcatcaacaaacctatatataagtagcacagacaggaacagagtccttaaatgcaaaaggcatcggcagtattatgttcagaaagaactccccactgaattgaataattaactacagaaagaaaacatgatttttcaatatagatgcaaacatgattgtgaattaactactatagtgtggtaaaaaccactgagtattcaagttcaatggtgatcttcccagaagtactgttagatcatttaaatagaataactgcagctgtccaaatatgcagttaaggcttgaaatttttgcatgctacgctatacacttgggttcaaccttaaaaggccagtatgattgaaacgatctgctattcaactactccctccatttcacaatgtaagtcattctagcatttcctacattcatattaatgttaataaatctagatagatatatatatgtctagattcattaacatcaatatgtatatgggaaatgctagaatgacttacattgtgaaacggaggaagtatttagaaaatcaaaggttgcatcctcacttcccctaaagaaactagtttcaacagtcaatcatgtactaatgtctgttaagctgatttatatgtatattgttgattcgcagttgcaggtatcatatacagaagcaatctggatgaagtgttataatactaaggagcaccataaaaatataaacacccatattggaaaaaacctgcttgcttaccaaacaatgaagcaattagtgaaatgacccgttcttctagtgcttcctgataactctcttttttgtttttcttgttcacaggaatctgaaaaaccatatcccgaaataactgagaagcacataggtgattacctcataaagcagttactataagttaaaaatggagacgaataaagatgtcatgtagcaaaggtctactataagctgtttttcagttgaaacaataaggtgtatgctactagttaacagcatttgtgcaatagaaaaaaaaaaggaacctcacataaatttgatcaagtggactgaaactgaaaggcaaacaggatgctctgttataatttgaaaaggcagcagcatgtgtttcaagttacttaaatcagcaatgtatgtgttttccatgtaatgttggttgaaaaggctgatgcagttgaaccactttcatccattttcagatttacttcccaatagaaactgtaactgcagaccataagaacatatggccgggttaaaggtaatagtgataaatttaattctcttgcatattactgcatcacagcattgattgatgttcacaattgaaactatataggatttgatcagtataggagtatacaagcactttcatccattttcagatttacttcacaatggaaactgtaactaaagaggatgagcatatgaggcttcaggaaatggttatcaatttagttatcttgcatgttagtgcatcacagggcaccgcattgattgatactcagcatccgaaatcttataaatgagaagagaaaaggagtagcagacacttgccttacccatgaacgcagcaaaagcggtcttcagcccaagtacatcaacaaagcgctcgcaagcaggtgggaacctagtcatggcaaaatcgagggtccggatggcagagctgtatgccagcttcttctgcttcatgatgatgatcatgagctcgacgccctccgccttgacaaatctttccttgttctccatgggcatgagcacacagcagaggcaatcgaagaggttctcgagcatctcctcctcatcagaggtctttgggtccctggacttgtacatggcaacggcctgcagcaggccgtcgactccattgatgttgcccaggcgcttctggttggcggggctgtcctgtaggaggatggcgaggatctcggaggcgtactgcttgttggcatcgaactcgcgggccttgaggcgggcgaggagccagcggagaagcttggtgcggtcgcagacaatgtcggcgagttgggggcggagctcgaggaggttttcaacgacagagagggtgtggtggacagcctcggcttcgtcggggtcggcctcggagaagcgggagagattgtggacgaggaggtcgagggcgttggcttcgacgagggcgtcggcgagggagtggaggccggcgaggtcgtcggggtcgtcggagtcggtgaggtcggcgaggagggaggcagcggcggcggcgaggtcggcgttgtcgtgggtgaggagggaggagagggaggaggcgaggccgagggggacgaggtccgggaagaggtccggggcgccggcgaggaggcggaggcggtcggtctcggcgtggagggcgatctcggagtcggcgaagcgggcggggtcgtcggggtgcttcatgcgggcctcgaggttgtcgcgcaggcggcgctcgaaggcgagcaggaggcgcttggcggcgcggaggtcgagcacctccacgtcgtcggcgccctccagggaggagaggtccaccgcccccgcagcgccgtcgtcgtcggcgtccggccgcttgcgcttgtgcgccgcatccatcgaaaggaatagggggagggggagaggctaaaccctaaccctagccagcgagcgcggggccggaggcggaggcggctgccgctgcggaagaagaagagtagtagagctctaagattcgtgcagtgccggatgactagatgatatgaggctctcagtatactcgcagcagctactgatgacatacagtatgttaaaaaacagcagcagattgagtactttgatcaatttctgggctggattatcatcaacatgttgcaatgcaactacaaatgagatctacaaatagataaatgctttcatcaattgattgataaccagatgatcgagatgaggcattcatttcatacatgacaagcagattagaggtcagaggagagaccagcacatcacatacgtagctccataatactaatactctaccaagaattaataataagaagaagagtaagccgttacattcatgaaaatgaacagagagaccagtcacaggccaagaaaaagctattactagtacttgccttaggaaggtacagtaagttaaaagttgttttctgaccaaaggatgactctacaaccagaacgagtagcattcaggtaggctttgtcatgccttggggggttcttcgttctatccactggagtagaacccagcagcaagtttttatattagcaggatcagatgagcagcacgcctgccataagcagcggatgatggtcgctttcattttcatttcttgtgcgccctgtagtctggggagtttggtggcaatggtgaaagcgggtgcctcgatgatgaatctgcaccattgaaatcgatggtccgacccactgggctcgtatccttcaaacttgatgatttgcgcttgtgctgcaacaaacatatacatgatgacatcaaacttctttccaaccaacattttcaacaagagacaaattttccttgccagtttataccttggtggtggacgcactggaggaatgctttctctcagaccggtgctgtcgctctttctccaacagagccaacagttttttgttctcttcgtcaagaatcttgttttcctcgaatagcagcttgaccttcaattgaacacaagaaaattttctagccatcagccaggcggcacaggtttcttaatgatgcagaaatgaatgcaaggacaagagtgtttcactatcttacctcctcctctgctttattaagattgatccttaggttttccttgtccttgtgcagagcttcaacttgagtggtcaatgcagaaagctgcatatggaattagaatcagaatagatcaagcagggggcagacggtgctatagcatttgttactaacatctcaacacacgagcttagatgatcaaatagttaaagcagaatattcaacaacagttgatcaaatttttactagtttttttttgggatcaaagaggaacgaagccgtttccctcatttacattaatagaacggcagggtttactacatactagtaacagagaacaaaattaaaaagaaaatgcaggcctccgctctactggtgccatcccagcaacttgaggctatcctgaagaaaaccatctactggcagcaaaattttacgacattaaagcgaaacatgtactgaagagttctcaatccaacaagaccacatcacatctagtagagggaatattaattaatattcatactagggtaaaagaaaagaaattcacacacatgccgcgccaagaatgaaagaaaggggatgcgaaggaggaagggtactgacggtggtgtggtcattgaggcgtgcgcgcatttcgtcgttctccttagcgaggtcgtcgcaggactccatggcgcgttcgaggtcccgctcgtagagggtgcactcccgctcaagcttggtggagtgggaggagaggtcgttgtaggcggagaccatggtctccttctcctcgatgcagcggcgcaggcccgcggcgttcatggtggactccgcctgtgcaccagatccagcagagcaagagcagttgcagttaggggaaagggaaagggaaagcagattggtattggtattggtactagattagagattagttaccttgagctgttcgatgcggcgtgcggctgcgcggaggtcctcctcgaggacgaagacgtggtcctggaggcggcggcgatggtcctcggaggcgagcagcttgaggcggagggagcggtcggagacggggaggccgagcgagtcgtggatggagtcgcggatgtagtcatcggcgccgccggggagaggggtagaagaagcatcctcctctcgctccatggatgatcgccttcttctcttctcttcttccggcggcggcgggggcggcggcgccgacgaggagaggagaggagaggaggcggcggatgagggtgagggttggttgatcgatctggaatttcttggggaagagaatgtgggatccggatggattttgaactgaacccgctggataaggccggggtgaccgttgctgctattattgggccgggccttctctttcgatcttttccttccctatttcggcctattgcaggttctctttatttagacttaactttattgacttagacttttaataagtcagcttattagtttatatgatttatatatataaaccgatggatttaatgttttaagtttagtggtgaagtcacatctctacttcacataagaaaaaaaaaatctccaaactagtttttggcttgatgtgttgagcggcttatggcttcaaaataagccaaaaaaaaaaaactgtttgattaggcttagactttttggctcgtaaactatttactgggctcattttaattctgcagttgctttcataggcacgcgcattgtgattggatttcaactgcatatcgcactactcctgcggtaaaaacaaaaatcaacgtttaggataagattcaaccaaatttttaaaattccaaccatcactatattcggataaatttataaattgtaagttgataatactatggtgaatccacatataccaattttttatattaaacgaagctttcgggaaattttttatggccataatttgaaaagtttaatacaatcttgctaataccgaccattatacattccagaccgatgcatgagttgaccaatggacaagtacaaccttctagctctgcttgtacttgtagaatagaaaaacagtgtcggcggcaacaaaattacagagccccagaggttggtctgattacgagcatatgcacgcagtattttatgagataaaaaaatcaatctgtttaagatatcgatatttcgtacttcgttctgacatgtgtcaacctcattagctaaggttaaaaaaaatatagtccagaagaattactgtaatgtaatactgtagtgctggccagttttctccattgcaggcaaacctctctatgcaataagtcttgggagatgagatgtggaggccccagtgaacaagtagaatatgtgggcaatgaatcaattaagcatttcgtttccttggagagctagttagtggtagcggataaaatgaaatgtagggaaggaatacaaatgaagaatctcacaatgcgatgatgacgatggaaagaaatgccttgcttgcctggactcttgccggtctcgtccttgataccataacttgttcactttaatttgttctccatcaatcgctcaagcaatccatgctgccgcagaaggtggtgtaggtacatataagaaatgatgcctgcctgcttcttggaagtcatctttcttctctctccctccttccttcctcttgatcatctagtataaattgaggaggcttgctggatccatacaacaacaaagacagtagtatcatataacagcaagcaaataagaaagctaggtagggcattcctccctcctcaagtagagaagagctacagctgcagctgcagaggggggcataatggccgtcgggttgaggagatcggacagcattgccgacatgatgccggaggcactgcggcagagccggtaccagatgaagaggtgcttccagaggtacgtgtcccagggtaagaggctcatgaagaggcagcagctcttggacgagctcgacaaatccgtcgatgataaggccgacaaggaccagctcctccagggcttccttggctacgtcatatcctccacacaggtaggagaattacttactttcctaggtacatgcgcatctctctgtcaatccaacatcatccatgggccatgcaggaggctgcagtgctccccccattcgtcgcattcgctgtcaggatgaaccctggcatctgggagttcgtcaaggtccattccgcaaatctgtccgtcgagcagatgacaccgtcggactacctcaagaacaaagaggccctggttgatgacaaatggttagtcaattaaatattcacatttgctttccgtgtagctattactattgctatttaatcaacatccttttttgctttataatctcataatctggttggttatatctaaattaattaattggctgggtcaggggggcttacgatgacgactcccagctggaagtcgattttggcgccctggacctgtcgacgcctcacctcacgctgccctcctccatcggcaaaggcgcgcacttggtctccagattcatgtcttccaagctgaccgacaacaagaagccattgctggactacctgctggcgctcagccaccgcggcgacaagctgatgatcaacgacatccttgacaccgtcgacaagcttcagacagcactgcttctcgccgaggtttacgtcgccggcctgcatcccgacacaaactactccgaatttgagcagaagtacatgctgtattaccatacctggtcaactaccaaaagcatgcaacacgaatacatgatccaatatatatttgtaatgcatcatgcaggtttcaggagtggggactggagaaaggctggggtgacactgctgaaacatgcaaagaaacactaagcagtctctcggaggtgctccaagcaccggatcccatcaacatggaaaagttcttcagtacggtgccctgcgtgttcaccgttgtcatcttctccatccatggttactttggccaggagaaggtcctcggtatgccagacaccggtggtcaggttgtctacatcctggaccaagttagagctctggaagacgaactgctgcaaagaatcaagcagcagggcctgaatgccacacctaagattctcgtggtaatttaagttttcaactaacaattgcatgcatacctgggccatccatatctattatattattaagacagctcgaaaaggaggcaccacgttcgctgtggaggctagaaattcccatattaataggagaaaaagaaaaaagaaaaagagagtccaagtagaaatacaatctaaaaatagctgaaattcggaattaaaaataagcaatattgaaagaagtttccagaaataaaaataagataaaatccaaaattagaaaaaggaaaggagagtctaagtaggaatacaatctaaaaatagctgaaattcggaattaaaaataagcaatatcgaaagaagtttccatataagaacccaatacgagattaatcaaaattcgaaataaaaataaaataaaatccaaaattagaaaaggaaaggagagtccaagtaggaatacaatataaaaatagctaaaattcggaattaaaaataagcaatattaaaagaagtttccatataagaacccaatacgagattaatcaaaattctaaataaaaataaaataaaatccaaaattagaaaaagaaaggagagtccaagtaggaatataatctaaaaataacttaaaattggaattaaaaataagcaatattgaaagaagtttccatataagaacccaatatgagattaatcaaaattcgaaataaaaataaaataaaatacaaaattagaaaaggaaaggagagctcaagtaggaatacaattttgaaacaactgaaattgaaaataaaaaattaaaacattaaaagaacataatacggtagtaactaatttttaaaaaaaaataaattatgaaattagaaaaagaaaaataagatttcaattaggaatacaatttataaataactaaaatttgtgataaaaataaagactattgaaaaaaaaaagaccatctaaaacacatgacgagataaattaagtaacatgcctataaaggagtagagtggtggcggttgatacgacatataaaaattgttaataaaacaccaaatggaatcctaatgacgattaaaaggaggaacgtcaggtaggccgtgaagcaaacaagtaaggcacttgctgggacttctagaaagtaaaaaaaaacccattgataatcatattcgatttttaaaatctcaatgacaataaaaatgagaagcagcgggcgaggtgtataggactatagttgcagagccgccgacggttgacgggacttctataaaattaaaaatgaattccaacgatagttatgttcgatttttagaatcacaatgacaataaaagagtaggcaacggacgggctgtagaggggcacagtgacatcgtttgatgggacttctaaaaattataaaaaatgaaactacaagtccaatttttaaaggttcggaacttccaaaaagtaaaaaaacccaatgataatcatgttcgattttaaaatctcaatgacaataaagaagggaggcagcgggcgagccgtagaggaatacaatggcaaagccgctgatggtttggcgggacttctagaaagtaaaaattgaacccaaacgataattatgttcgatttttaaaatctcaatgacaataaagagaagaaacagtggacgggccgtagaggagtataaggtaacgtttgacgggacatctagaaattataaaaacaaaacccaacgtgacaataaactctaaaaactataaaatccaatttttaaaggttccaacaagaatgaatagaaatagtggtagatcgagcaagcaaataaagaagtaaatgacataaggggtagcaactggtgtgacttttaaaaactatataattagaaacacgaggatgataaggtttggtcttttaaagtcttaagacaatgagatagctatttaataaattttaagtaaaatcatactaaaaaatatataattttgtttggatgctagccacgcaattgcgcgggccacccagctagttatcatatatgatactacataatcacttattgagaattcagatagatagtgacatatgaataaatgcacatattgcagctaacaaggctcataccagaagcaaagggcaccaaatgcaatgtagagttggaaccgattgaaaacacaaagcactccaacatcctccgtgtgccattcaagactgaggatggcaaagttcttccacagtgggtctcccggtttgacatctatccttacctggagagatatgcccaggtttgccagccagttagatgccgatttcatttcctactgcacatattttaattttacctgcagcattcattgacaataaacttccttgaattattgtacatgtcgatatcaggattcttcagtcaagattctcgaaatattggaggggaaaccagacttggtcattggcaattacaccgacggtaatctagtagcatccctcctgacaagcaaactaggagtcactcaggtgaaaacggatcactacagcaataagatcatgctggttttaaaataatggccaacttttgcatattcatgagattataatgactaaatatgccaacacatcgctaaaagaaacttaccatcaccaatcaacagggaacaatagcgcatgctctagagaagacgaagtacgaggattcagacatcaagtggagagaattggaccacaagtaccatttctcatgccagtttactgctgacatgattgccatgaacactagtgacttcatcatcgctagtacctaccaagaaatagctggaaggtcagttactccacaaaccaaaatccttttaccttgtggcttagaactaccactatgcagctgatagcctgacattggagcgtcaaaaatataaaatgcagcaaagagaagcctggccagtatgagagtcactatgcattcactatgccagggctctgccgctatgccacaggcatcaacgtatttgatcccaagttcaacattgctgcaccaggtgcagatcaatctgtttactttccctttacacaaaagcagaagcgcctgactgacttacacccccaaattgaggagttgctctatagcaaagaggacaataatgagcatatgtaagtacatcccttgggaagcatatccagtatgcaggatcttttttttttacagcattgctttattaacaactcgcatcacatgtggtatgattaaatcagagggcacctagcagacaggagtaagccaatcatcttttcaatggcaagacttgacaagataaagaacatcacagggctggtcgaatggtatggtcagaacaagaggctcagggaccttgtgaaccttgtcattgttgggggcctcctggacccttcacagtcaaaggaccgtgaggagatagaggagataaacaagatgcacagcctgataaacaagtaccagctcgtgggacagatccgttggataaaaggacagactgaccgagtgcgcaatggggaactttaccgttgcatcgcggacaccaagggagcctttgttcaggtacaccgtcaacttaaaaggatactactattttcttggttttaaacataagactgcaacactaaccttatgactggacgctgtggctgtcagcctgcactttatgaagcattcggactaacagtcatcgaggcaatgaactgcgggctgcccacctttgcaacaaatcaaggaggacctgcagagatcattgtcgatgaggtttcgggtttccatatcaacccgctcaatggcaaggaggcaagcgacaagattgctgacttctttcagaaatgcaaggaagacctcatctactggagcaagatgtccaccgctggactccaacgcatctatgagtggtaacaatagccattccacctatcactctcttctcagctgaacctaaatatatatagccatcaccaagaaaaggaacagtaaaatttgtgctgtttgcatctatgccttgaacactttagatccagtcataccatgctaaaatcctaggtggataccttatgttttttcttaataaactaagggccatgcttgtctatggttgaagttacacgtggcagatctatgcaaccaaagttctgaacatggcatcaatatatggcttctggaggactctagacaaggaagaaagacaagctaaacagcactacctacacatgttctataatcttcaatttaggaagttggtgagtttaggaccagtgcaagacaaacaatatgctgaagatctatgaatatattttgttcatttctttcaatttttcaggcaaagaatgtgccaacactgggcgaacaaccagcacaacctacagagagcgcagagcctaataggatcataccaagacccaaagaaaggcaagtgtgcccattcttacgaaatttactgaagaaagagacagggaacaactgactgaaacatttgtcgtttgagcgctgcagaaggacgcaaataaggatccagaggtgagaattctcagcactgatgaagctgcaaaaacagcaaacagagagcatcactccagactgagatattaatccattaatatactgttgtgtcatgcaggattgcaaccaacttacttggaccactgctcccagcctccaatttctcaacagatggagcttgaagtagagaccaatcgtcagaactttctgaagttgttggagtgagaaatgtattgtataacattgattgtgaagatttaataaatgattactgtgggaataataaaaagattaacatacttggtagcactgactacttataaatagtatgcctggagcacatataaaactcatcactctaaactcctacatgtacgggacacaagtactaatttctagcaagaaaaaactaagatgaaatgctcaagcccagtcgcaaactcctcgaatcataactacagacatgacagtaaaacataatacatgataacaatagtccccgcaaaaaaaaaaaacaatagcataatatacatacatatagggtaactttggcaaacatgaccagcatagtacaatggagaagatagcagctggcagattattatgggattttttgacacataattacaaccatcataggcaggttgccaagaaacgaagagctttagctatgtaggccctagcttcagcagtagaacatgaccctcttcacactatccttcagagcaggaagtggcttaacagctgcaccaccaggggcccgagtacgtgatgttgatgagccagaaagtggcccacgtacaccaggcccactaacgacagagctgctgtcagatgtatctggttccatatagaaacgagcacggaaggcagccagatgagcataataagcaggtggaactgcaatggaaggattagaaagatattagccaggagatgagtcgctggaattttgagaaaactatccccagaagaagataactaaccaattgatacagagcgagtgcaccttgcatagctgcagaaaaaatgatggaagttagaaactaactttctatataaagttcaccaggtggtcagaaaaaaagggcatgcttacgtgtagcaaaggttgttggtaagaatctgcaatgcatcagctgtgaagttgttttcatcccacaagacatgataatgagctggacgactagtaccctggagagcaggatgttgtaccttatttgttaagactcgtagaaatacaaaacaaaatcagaatccaagcaattcctgggattaccttaatgccagcatggctacacaggtagaagtcaaactcagttggatgacagatctttgaatctacaaccgtaccttcaagtatagagcatggagaaaaaagtaaccaattaaccaacagaaaaaagatcattggtgaaaatgtaaagcaatatgttgttggagttattcataagatctaccagggagtatgttcccgctcctgtcaactgagttctgatcgttgtgattatgtgcaaataatcttgtgtggtgacgtttctgaaccacaatgaaagtcacctttggttggtaatttgtctccagggaggcacatgcctgagtaaaacaaggacatcagaatttaatggttacatggaatatgaaaaaagagggaaggatacaggatctggcaaacttttacttttcggattgcattcaattcataaagtagaacttggtaaaattggccttcactaacgccatccctgacaaaagaaaacaagatccggctttagtggaattatgattgtttcctgttcagtggaagagatgtcccctctagcaaattcaacatgttgctatgtttcaaaagatccaacagaaatcatggatatagcacatataatatttccaaatctataaatcatagaaagtctaattgttcctcctaaagggtagatacctgtaaaatattattcgctggggcttctcaccagttgatcttttgaaggatataagcagctcactgcattttttggcaatataaatataaaatgggctttaatatcatgttattttaaaaatgaagaactatctgtgaagttcttaaggaaagaactactaaaaaatactgagtagcataccggatcatgccaccactaactgttcctctctgtggatcctgccagattttatatagatcttctatcagctcttgtcggtgggcttgagcagaaaccaacccagcatactttgtcacctcaggccaatcttgggaggctacaacctgcaaaacgatatatagttagcgtaggcagagtaaattattaccctccagggaaaaaaaattcaggaacaggtcacaggcgatattctacttacagcagcaattgagggactgctgtcctctccaggatgaggatgggtaacatcagcaccaaatataattgtaggtctgtcggttaccagaggaatacgccttgacacagcatccaccagcacagtgttcctgcccccaaccttgcaaaattaaatgatgaaaaattcaataacatagaagaaatacaaattgcagcgaaaaggcgtaaatggattgctttaaccttgacatttatcttcagagcaagatttgcaagaatttgtttgttcattttgaacacctgcttcgtgcaacagcattgtgaaactattccaagatctatttcacacacgcgcttcaaatcaccttatagagagaaaaaaaattgataaagaatcacatgcacaatactagtgagaatccaacaactctttgttatcagatgcaaactacaaggattctgattatcagacagacataccataaagcgagccattgttatcaggtagtatcccaataagcaaatcaagttccctgcgctggggtccaagaacgttcattgcatcatgatacctagcttttagagcacgctccacttgatctggatgtgcatttagtggtggaagaataggttctggagcgaaatcctattacaatgatgcattacactgttattattgtaaatggttaatatgaagtacaaatcttagaattcatgttgaaaattttatatatggatcttggtgtgctttgctcatgctcaaatgagagttttgcaggaagcatttcaaggatacttgccattcctgaggcttgacacatcagagcaagttcatggcagaacccacgaacaacactttcctgcacattacgggcaaaattgacgcacatccagcttctgactttaccaccatttaccattttctgcatagaaaaatgaaaagggacattaagtatgtggtcagaataaacaaatctactaatttgtttgattaatgaatctaaagagagtacttaaagttagtctgtaatgttatccagttctatggacctaaataaagaactaacaagaatattgcatgggagtttccacattaatttgcatgacacgtcatagttaccatgcatgctatagttacaactaagtaaatagcttctcagataattaagaagaatatccaatattagccccttttctactctagcctttgtgccaataaatggatggttgctggacaacagaatgttcatgtggttaccttgttcatcatattccattgaccaactcttggtaagcaatccttctctcgaccagtctcattgtacttaagctgcatcacaagaaaatataacaaaaaaacatatttgtaaggctacaagtatataggagaaaatgttaattgcatcccttttttttgctgtatccacaatacagttagaaaggacaagaagggtataacaagaaagtacatcaaaatcaacaaagcctcaacaaagccatagtcaacctacccgtggagccggtaaaattcgtgcctctactgatgccagacgatcacttatcttaatgccaaactcttttgcgtaaggatcatcctgataagcgttatgtttaaccatctgtgtaccatcccaaaccagagaaattgagaattatgttaaacattaatcacgcacacaatattgcaccactaagacgtgataacaaatttcatgccttaataatatcacgctcccgatcacgtgggtgttggcatgtctcctccaaaagagctcttatctgattctgatttaatctcttggagtatctctgtccttccactattttgcagacctggttaaattcagtcgcaatcaccgtgaatccaaaattgaacagcaccagtgtttggtattatattttcaatatgaacatggaaaatgtaaagttgggccagtgttgtagaaattcattacaacaaaaggcaacaaaggttcaccactacattacctccataggcaggtaatttaatcgctgaactgtaaggcatggaaggtaggtgtgttggatggcaaagccatatgtctcttgaaagtactgtacaactgacttcactgtgcctccttcatcaacaggaaaactgccacaaggagaacaacatatttttttcagagcatacgaaagtagcatcacagggccttttctatgaataccttagagattacttggtaaaacacacagattagaaatcatacgttagctcacgagttggctgaattgtcaaaccagatatccggtacttccgcctcatgttgccacggtgggtaacttccacctttactcctctcaaggctttcttgatctagtgtttcaatacagtgggagcatagagattaaattgttaaagcatacatacattctgaaaggaaaactttagagaagtcaatgtcaaccaggaaaagcaaaataaagtgtaaaaaatcccaaactgaagttcccgacttcttgtaacctctactgcatttcttgttttaaaagaacttaaaaaaattccttgagctgccaggaaaaaaagggacttcatgcgttccagcaaaagcccaaaggtgcaatatatagagtagagtactattacatgggacagacaagcaacactcttacactgctaaccaattaatgattgtaggcccaatacaattactgtgtggtatactggtatcacaagtatctctatctttccttttggaaggcaaggtgattttatgttgtacaatcctcatgtacattgtcagaaatagatataatcttattgtcaagtacggatgatatgagagaactaaaaatcacaatgccccgatcatcacaataaatacaataagaatgctatttttttaggaatatataatctcgtcatttttttatgaaatatctcaatgcgggagcattagccagctcattaaatagcataaagattaatgagttgcatctataaggagaaacaaacctcccactaagatagacaggaaagtgggacaagacatacaagttttgagggaaaaatagaacatagctcaagagatctacatgtctttcttttaaaaaaaaaagaatgtgtaaatttcatttgagaattggcccttgctaacagatgagacagtcacacgaaaagtaagtttagtaagagcaccttaacacgttcggcatcagaaagcggccttgaatggatgtcagaattcaatagttgtgcaacaaaatcaataacaggtaacggctcaatgaaagctgtagctgacatatctggaaaaggtacaaatgctcaatatggcacaagaatcatcaaggacattaaatgcatttatcccaaatgaaacatataaatttgatgtaagtgaatcacataacaattccagttgaaaataggaatgtaattgcaatcgtgaaacaaaaaatagcactcaaatctaaaaagtactgagacctatgcactatctctttcttcttgctcacttgttcatgcaatagaacaaagaatatgacttacatttcagctatgcatgcacacatcagagagagagagagagagagagatttaccaatattcagtgataagcccatctgagtaggccgaatgctctggtaaaatccacgccagctttccaatccctcaccaaggggttgcctcctacccaagtaaggcgaaaagaaggaacgtccaaatggcgcatatctgtgaaccaccaaaatgagaaaatgtcaaacctctgtttcttaaatgtcttgtgttagatataataagtggcataagaacctcgtaggtaccttgctgatggtagctctcgcagcacaatatcaagaacttgcagtgcctcctgtggagcttctgcgtgcctcccagctaaaaacaactcaagccggtgaaggtcggcccgtgcggcgaacttgattactactcggaaagtcctctgtcgcctaaatgaaaagaaaacaactaagtcagcaagattggccacataatactgttgcttttgtacaagtgcgggaggtgaggcaaagtgagcaggcgacctctcagaaccagaaccatcatcgtcgtcaagtaaagtgatctgaaactcctgtgaagtaaacggcaatgggccagccgtgtataagctctttctaccatcatatgcaggcagcctcccacccagataagatgccttgtacagatttaccagctccttgatcacagctcggttaacaatgcgtgatgtaacttctggagtgatggagacctgtcgaaaatcagacagattagtagagcaaaactccagctaaaaatgagtgggtttgaggggggggccggggaagagaacacacatcgtagtgatgaagatccttgttgggcaggtgagcgaagaaatgattggccttgaccatgcacctggtgccaatggtacccttccccgggcgcaaaggaaacctaattgacttgcttgaggatggaatatggtgcggcgtcgtggtagcggcatccacaggttgttcctgaggcggagtgggtgagggttgagcgagctcactgggacggggagcttccattattgcttggcgcagctcgggagctagagggcttgatgatgcggtggccgtggtagatgaagaggaagccacggtgacagtggtagcacgagtaggagtagaccttggctgttgctgctgctgctgctgcggcggcggcggcggcgaggcacctctagcacggcatcctcgtccttgctgctgctgctgctgctgaggctgaggctgaggctgagcatatcgggcggcacggcctctccctctccctcttccaccaggatctggagcctcggtatggtggcggtgcgttggcctccgtgaggccatggcatgcagggagtggtggctggctgcacaagacactacccgtagcttagcaatttagcacaggaacagaaatggcaagcgagtctcagtctcactaggggagattagatagactagtgagtgaagctgaggaggaggtagtagtaggtaggaatggattggcataccttggcttgtcttggacggggcggcggcgggggagtaggaggagatcgatcgatggatggagagttgcagctgcagctggcaggcagcgagcgaggccgggccgaggaaggaagaagacgaggggagtggagcacagcacagagaggcgttccaggcagagcaccctatgctaacctggtcccacacccctccttcccttgtctatcgtcgacatgccacgtcattcaccctcccccccccccccctctctcacctgtattacggtgtgtttagttcacgctaaagttaaaagtttggttgaaattggaacgatgtgacgggaaaattgaaagtttatgcgtgcagggtttctcttaccgccggtaaccgcgcggttaccgggcttaccgtgaggggtacggtaatataaatatcgtggtaacatccttaaattcaaataaatttaaaaaataatttgaatttttgataaattttgtacggtttttcacggttaccgcgcggtaaccgtgctttaccaccggggcgcggtaaccccggccccaacggtttgggataccctgatgtgtaggaaagttttaatgtgatgaaaaagttaaaaatttgaagaaaaagtttagaactaaactcggccttaatctcatctggagtactcaacatatccactacagtattaaaaactctcatcagatcagacttgagtagctgcttttacatatactcctatgccatcgattttttttaactttttaaaaattttaatattaaaaataaacctttcaaatcttattttgaagaattgaacattttagccacaccagcacaactgatgtgacaaaacaacgatgtcacaccaatttgactggcatggtaatattggccctgtttggatctaagggttagagttagaggttagagttagtttccagctctcaactaaccctgaactaactctagccctagagatgtttggatggaagggttagattgacaataaatatacttttccaatcatttggctcctttccaaccagatttggtgtggcagactcatgtgtggcctcctccctctcacaaatgacacaaacaaatcatatttcaacccctccgccgccggcgcttgcgagttgaggtcgaagccggtgccggcagaggaagcagtggcagggccgctcgccgacggctgcgaagcccacgcactgaggtcgtcgaagccgtctccgtccatgcgtggccggcggcgcagatcggtagaggcggcgacgtggatggtcggaggcggcgcggctcggggacggtggcggcgctgaggttggccggcggcgcggttggatggaggcgacgcggcttggggctggcggcggcgctgaggttggctggcggcgcggttggagggagggcgcggcgtgggtagtgggggaggtcgcgccgcgcggatcggcggcggaggcgtggatcggggacggcggtgcggatccgtggtggcggcggcgtggatcggggaggcggcagcgtccagcgagaggatcccgtgcgggatcgggaagagatggggatctagtgcgggcagagagagagagagagaagtggcttctacggtgggccccactcaaactagctccaataagcacctcttggaggggctagtttttttggtgggttagatgcaactagccccaatctaacccctcatgtttggatcctttagggctatttgagccctaactagctcaaactaactctaacccttggatccaaacagggccattggccttgttcggaagacttgtttgccacaacgcagccaaccaacagttgtaactagccactagtagctacaacctataggtgttgaatctagcaagtgttgagagcagtagtttgtgtgcagctgaatggattggctgtacaacacagctagacagctgtaaaatttgggctatcaagcatgcttgttatttggtcacatcggtctggttagcgcggctgcattatttggccacaccaccttccctcgcatggcaagatattttgccacctagaacggggcaatcaaaaggtttggattctggaaataagttttggaagatctatttttaaaataaaaaatacaaaagttcaaaaaaaattccataccatcacctgttcattcttatgaacattcatctttgattaggaaacatcctactaataatatgaacagacaacatcctactaataatactcatcaatggtctgcagtaaacttcaccttcagtataattatttgttcactggccccagatatagaaaaagacattagtatgtactactagctgtaggaagagtgttcaataactctcagatactacaaattaacggtaatactatcatttcttatgtgtaatgtcttttgttttccaacacactttccagttgtgtgtgcccactgcctactgtttcatcctcaagcaccaaatcaatcaatcaacagacgccactgattacacaagcaccagagtttgtccataacatgctcagagactcaggagtgttacattattatgttaaagagatccagacccctactgatccaacgtatcaaagcaaagtaaatggataatgttacagcataaaggaaaggaaaaccctttttacccatacccagtgagccggaacatttggttcagtttacatgccaaatctcttgtacaaaaaaaatactatatgctgcaaattgtgcagcaaggggaaaagaaatctttttaggctgcccaaatcaatacattcctgtaaaaaaaaaatcaaactttggtgcaatcaaatacggttaaccatcatctaagaaatggagtacctccgtaaggagaagccaaattaaagctacagttccaacttctgggtgcccaactgactgagcatgatggccatgtccatccctgaggtcattgttgccatagccatctcgtacgggcatttcctagagaagccaatcttgccagccttttttaccttcctcatgcagtttttgaatttctcatggcatttcacactcatcagacctgcaaccaagaaaaagaagaactaacatgagttggttcagtaagagatgagatgaccaggaaaatttcataaagaaacaactgcagtgcttgtctctcacccctggatagtatgtttcatgcatagcccagtgaaaaatgatcaggcaatccaagcaagcattataatggttgtgaataagagggtgaagatgattgttttcgcgtaagtggggtatctctgctagtgtttctttttaaagaaaaaaaactcctacatagtatctctgctagtagataaagtttgattgtccagtgatttgaattcatgtgagttgatgtgcagcaatctgaaattgtttcgtgtgcaatcattcaagtctaagacagtgaattgagttagagtaaatgtgtagtatgcttattattgtaggagtgaagtaattggtagagagatccagagaggaagaaagaaactcctaacctttcttgtcgacgcagtggtcgtggtcgcggcagcaggcgtcgaggtcatcgcagggctcctctccatcgcagccgctccagccaacgccgcagtacttgccataccggatccctacggctgcagagacaaagagttggaggattagatggtgggggacgccaatcagttggaggtaagcgctcacgacgcacagtcgcagttgagggcggcgcacgagcggctgcacggcggcggaggcggagaggtggccgaggataggacgccggcggcgaggaagacgagggcgagaagcggcgatctcggcggcatcgtcgtcaagattggatgggatggtgaatttgcgattggttggtgggccatacttgtcagtctcagttacctaaacccactccaccacacgggtcgactcgactcccactcgtcaaccacccaaaccccccaccactaccgagtaccaaatggcggcggcggcggcggcggcggcggcgccctctccggctccctgcttcccttccacccgccacacgctgcctgggctcgtatctgtccgcgtctctcggagagtcaaagtcgccgtcgccatcgccgaccccgctccggccttcaactccgtcacggccttcgcgcccgccaccgtcgccaacctcggcccgggattcgacttcctcggctgcgccgtcgccgacgcctccctctccctcggcgacaccgtcaccgctaccctcgacccctccctgccccccggcaccgtcgccatcgcatccgtcacctccccctcccgccccaccctcgccgaccgcctctcccgcgaccccctccgcaactgcgccggagtcgccgccatcgctgcccttcgcgccctcgatgtcaagtcccacgccgtctccatccacctcaccaagggcctccccctcggctccggcctcggctcctccgccgcctccgccgccgccgctgccaaggccgttgacgccctcttcggctccctcctacaccaagatgacctcgtcctcgcgggcctcgagtccgagaaagccgtcagtggcttccacgccgacaacatcgccccggccatcctcggcggcttcgtcctcgtccgcagctacgaccccttccacctcatcccgctctcctccccacctgccctccgcctccacttcgtcctcgtcacgcccgacttcgaggcgcccaccagcaagatgcgtgccgcgctgcccaaacaggtggccgtccaccagcacgtccgcaactccagccaagcggccgcgcttgtcgccgctgtgctgcaaggggacgccaccctcatcggctccgcaatgtcctccgacggcatcgtggagccaaccagggcgccgctgattcctggcatggctgcggtcaaggccgcggcgttggaagctggggcattgggctgcaccatcagtggagcagggccaactgctgtggctgtcattgacggggaggagaagggcgaggaggttggccggaggatggtggaggcattcgccaatgccggcaatctcaaagcaacagctactgttgctcagctcgatagagttggtgccagggttatctctacctccactttggagtaggaaggtacttttttttttatgtgttccttacggtgcctcagatattctcctagtattgatcacaacatgtatgcatttcctcaaatcgcttcaatcccaagcacaaatttcactaatttctactgggtcactaatattcttggacaatggaaaatgctgggagagtgaggggttttggacatcgatttactgttaataccacatccaatttctccgctgatacattggcataaataagttggctttttttaaggcaactgctataggtagtacagtatgtttttggacagcagtttcagagtaacatttgtagctcaggatgatttctagtaattgtgttactctgaatgaaaagattcaaactttaataggcctaaatatctggacttttcagtatcttagaaggcatttcgatacatacatgttagccatgtttgaggttatgttgagttgttgcaagatctgtttagtccacaggcaacattttttcggtttttggatggcatgaatcataaggagaagtaggcatcataaattaattactccctccgtttaacaatataagtcattctagcattttccacattcatattgatgtaaatgaatctagatatctagattcattaacaataatatgaatgtgggaaatgcatggctaattaattttgcaccgagactttggcggttatgctctcgatatttgatatatgaccttttgctatcgatctctgttttccaaaatgtgctggcaataactgctgctttcctttgtttatgttaatgaaaaactcattccaatcacaaaaagagatatgctttcttacttgtgaaaaactccttccaggcgcagatttgctgtgggtgaaacctcttactacgtgtgtggtttagttgaaactttccctttgtaaatttctttgcttagatccaggtgttggtagtaactggggatagaaaaggtttatctgtattgtcttaagacgttgcttgcattatggtgaatattataggcatgctgacttttaaatggattttgtgttaatgagattaaaaaaaaaacagagagggcagtcatgcttatgccatgtattatgtgttgcagatctgggaggactgctccggtaggtcaaatttggaatggctcacatggacactagtgggaggagaagaaggggggattggtgtgttttgtaattcctgggctgaccagaacgattgtcagtcagttgggttgtgaattgtgtgatgtagtagcaaactgattcgtgccggcaattgaattgcaataagctagtggttgcagcatcacctggcgaggcgtagctaggagatgcagaaacagcattttgacatgtgtgggtgttgacatgcaacgaataaaatgaatgaagctgaattgaggtttgtattgtacgagtacagtatgttgtggaaggcctttgaattatattgcattacagtttgcaggtaggtaaagcttgtgtaatcaatcattgatcgccagtgagggaaggaagggaggaggcatgcgcgcacgtcggtccaaggaagggtagcgcggcgcacaccactcgctcgccaaggttggaaggagcgtgcggccctgtttcccggcacctctttctccttaattccctgccatctgcatgcgttcatctgcagatcgactccgatcgacgcctccgcttgacggaaggaaacagaggggaagagagaggatcgtcgtcgacgatgatgcggcggcggctgggctgaaagagaaacagcatctcttgaggatcgtcgtttcgttgcatgggcaactactactcgtgcggcgcctcgtccacgtccagcccgacctcaccgtccttggtcgactactactactgctatcatcggtatccaagcagttgcagtagtacaagcacagcaacaagtagcggggggaggatgccgatccgcagccaccagcagaggctgtcgtccccgacggcggtgctggggcacgagacgccggcgctgcgggaggtgtacacggtggggcggaagctggggcaggggcagttcgggacgacgtacctgtgcacgcaggtgtcgacgggggcggagtacgcgtgcaagtcgatcgcgaagaggaagctgctgagcccggaggacgtggaggacgtgcggcgggagatacagataatgcaccacctggcggggcacgggagcgtggtgaccatccagggcgcgtacgaggacaacctgtacgtgcacatcgtgatggagctgtgcgagggcggggagctgttcgaccgcatcgtggagcgcggctacttctcggagcgcaaggccgcggagatcacgcgcgtcatcgtcggggtggtggaggcgtgccactccctgggcgtcatgcaccgcgacctcaagcccgagaacttcctcctcaaggaatcctcctcctcctcctcgctcaaggccatcgacttcggcctctccgtcttcttcaagcccgggcaggtgttcagcgacgtggtggggagcccctactacgtggcgccggaggtgctgtgcaagcactacggccccgaggcggacgtgtggacggcgggcgtcatcgtctacatcctcctcagcggggtgccccccttctgggcggagacgcagcagggcatcttcgacgccgtcctccggggatccctcgacttcgactccgacccatggcccaccatctccgacagcgccaaggacctcatccgccgcatgctccgctccccgcccagggaacgcctcaccgcccaccaggtgctttgccacccctgggtctgcgacgacggcgtcgcccccgaccgccccctcgcccccgccgtcctctcccgcctcaagcagttctccgccatgaacaggctcaagaagatggcgctgcgtgtcatcgcccggaacctctccgaggaggagctcgctggcctcaaggagatgttcaaggccatggacaccgacgccagcggcgccatcaccttcgacgagctcaaggaaggactccgcagatacggctccaacctcagggaggctgagatcagggatctcatggacgccgtaagaccgtcctcacttctctcaatctctcaatcttctttgcatctatatcctcttcttgattaatttgcgcatatatattgcaggccgacgttgacaaaagcggcaccatcgactacgacgagttcatcgccgccaccgtccacctcaacaagctggagcgcgaggagcacctgctcgccgccttcgcctacttcgaccgcgacggcagcggctacatcaccgtcgacgagctcgagcacgcctgcagggaccacaacatggccgacgttggcatcgacgacatcatccgcgaagtcgaccaagacaacgtactttcccctacttccattcaacggcacttacctagctacctccattattcattcattcaattcgtcacaatatgcaggacggccgcatcgactacggcgagttcgtcgcaatgatgaagaagggcgctatcgatatcatcggcaacggaaggctcaccattggaaggccaactacggctacttccgacgatccttctccaacaatctcttcttcctctagatgatgcatcaacgccaaacaaacaaacaatgcaaatatggttcccaattacttcaattcacaactccgactcacggatcgctcgcatggcatgctagctagtagcatatactctatactctcaagattcatcattctttttataccatgcatacagctgattatttcttgggatagaataaaattaagggcatatacctccagagatcgatcaatctatgcatgtatatggttttgttgcggatacatgcatgccaacggaagcaatttgtatatgtgggtacctgatccaagagagtgcatataaagcaatttttcctgtgtatatgtcattttttttaatcatcaattaagacttgtgacaaactttgtaatgcaggacatggggggcaaaacgggtgagtattagagtattgctgctgaaagatgagtctaaggctatgcaacattaattttgaatggttacggttaacaacaaattttggcaccatgagaaatttataacaagtttgggctagatatggaacaaaccgaagctttcctgaggaggccggtctgaccgccgttgtgtgaccggcttatggagggtgaactacagtctgaccgcagatacgtggcaagtcagaccgacagtcccgaatccaagttcaattaagattatcatgtttccttgcttgggcccaaggtttcttgaacgtggagatggtgttgagaaggcaagaccagcccctttatacgagctatgtccgattcaattctaacccccaaccataatccctacaatctatcgaattgttcttttacctttacttttttagccatgttttttactttaccttagtttcgtctatctttgttgatttgcgtcataaatcgtccgccttcgctgcgacagtgtaatacctattgtaggtttgtcccgtaaaccttccgattcgtccgcgagatgagtgttatcttcaaatcaatctaaatcaactccactagccaattaatctcttaaatccatgttggtttagagtttttagattggggtggttggcaactttgttaacaccataaatctttaggtgagtccctgttgattggaaaaggcgccaacagttacataaataatgctcccatttttaggaaaaccctaaataatacttcttttttagagacaccctaaataatagtcccttcaaacacaaaagaatgttgttttagaatcagtgcaatcaacagaagtttattttttactgcaaatttttaattagcatataagctttcataatattatacctacgcaactaaatattttttatttagaatataataaaagaattaagtgatcaaggttatgtcttattgactttcaaaaggtctaaaacgatattttttaggctggagggagtattcgatatcatgttttccaatcttactcttattggtcttacgtataggactggttcctcacaaaaataaaattccatcactggctactgaactagtacatacttatattttgggatgctaaagagccgtctcgtgaaatttaattaacacgataatacactgaattaatgatttaaaactgtactatttatatagtatgtgccatgtgttaagtgttaataactagctagttcagctttatctgtcccgttgcttaaatatgaattgttccctagaaccttttttaggatatataattgttcccaagatattgaggacgtggcaattacacatcggtgaataatagtttaacaaaaaaaatattatagaaaatattctaaattttctgaccaagtcgtgcttgctgatcatgcatgattataacgtgcaatgaaaggttatgttttggtaaaatttctggagttagaaaggaaggaacaaatgactgatcatggtgtctaaaagacatgtatttagattaatggataatagttcaatgagaagaaaattaaggaggggtgactattaattattgatcgaaaaaaaatcacggaacaacaacgttgatatgcgaataaaagttcaaactcaactcaactcgttaattgctcaagtcgagttatgcaaggaggagctggataggcgtcggcatgccatgggtgggctggtgaagctggcgtagtaggtaagcactaatagtaaccacttagtcatggacaggcacgtcttaacttgagctcggtagctagctagctagcgccgagtcatttccgtgtggcaaggcttaatccaattccaatctgcacatgcatctgcatcgatctgcatgcacatgtactatatatatatatacgaacaacgtgatagatcgatcgatcgatcaagaaatcaattcgatttcgccgctggctggctggttaactattgcatattaatttgcatgcgtcgatcatcgtgcctacccgatcgagttgaattgagttgaagcggctagctaggtagaggagaggacgatcagaattaaggaagatgagaggcgcggtggtggcggcggcggcggcggcggtcggcaacatgcttcagggatgggacaacgccaccatcgccggcgctctcctctacatgaggagggacttgccggcgctccaagcccaccccgcactccagggtctggtcgtcgccacctccctcatcggcgccaccatcgtcaccaccttctccggcccgctctccgactcccgaggccgacgccccatgctcatcgcctccgcgctgctctactccctcgccggcctcctcatgctatggtctcccaacgtccccatcctcctactcgcgcgccttgtcgacggcttcgccatcggcctcgccgtcacgctcgtccccgtctacatctccgagacggcgccgcccgacacccgcggcctgctcaacacgctgccgcagctcaccggctccaccggcatgttcctctcctactgcatggtcttcctcatcacgctcgcgcccatccccaactggcgcctcatgctcggtgtcctcctcctgcctgctctcctctacctcctcctcaccatcttcttcctgccggagtcgccgcgctggctcgtcagcaagggaaggatgaaggaggccaggaccgtgctccagatgctcaggggacgccaggacgtgtccgccgagatggcgctcctcgtcgaggggctcaccaccggacgcgacacggccatcgaggagtacgtcgtcggcccaacggacgaggccaaggtcacgctctacggcgggatgtcctcgggattggcgccaggcagcatgttcggcagcgccgtcacgctggcatcgcgacagggcagcatgctcgaccacctcaaggaccccgtcgtcgccctcctcgacagcctccacgacatgaacccccccgccggtggcactactgacgtccccaacctcggcagcatgatcggcgtccacgacaggccgcccatcgactgggacgaggagaactccggggacgacgacggtgacatcgccgcgccgctgctaaccatggagggcgaggccgcgacgagcacggtgggcatcggcggcgggtggcagctggcgtggaagtggacggagggcgtcgcggcggacgggacgaggcagagcacggtgaagaggatgtacctgcacgaggagcaggcggagggggtgcacgcggcggcgctggtgagccagtcggcgttgtgcaccaagaaggaggcggaggcggaggtggagggtgggtggcgggaggtgctggagcccggcggcgtccggcacgcgctggtgtgcggcgtggcgatccagatcctgcagcagttctcgggcatcagcggcgtgctcttgtacacgccgcagatactggagcaggccggcgtgggcgtgctgctctccaggctgggcctgcgcgacgactccgcctccatcctcatcagcggcgtcaccacgctgctgatgctgcccagcatcggcgtggccatgcggctcatggacgtgtccgggcggcggagcctgctcctgtggacgatcccgctgctggtggcgtcgctggcggtgctggtggcggcgagcgtggcgccgatggcggcggcggcgcacgcggcggtgtgcacggggagcgtggtggtgtacctgtgctgcttcgtcatggggttcggccccatccccaacatcctgtgcgccgagatattccccacgcgcgtgcgtggcctctgcatcgccatctgctcgctcgccttctggctcgccgacatcgccgtcacctacaccctccccgtcatgctcgcctccctcggcctcgccggcctcttcgccatctacgccgccgtctgctgcgtcgcgctcgtcttcgttgcgctgcgggtgcccgagaccaagggcctcccgctcgaggtcatcatcgacttcttcaacgtcggagccaaagggaccctaccaaacctccacgacgatgacgaccactattaattaacacaccatttatccattaataacatttgtcatttctttttgttttgcacatttttctttctttctttctttctttctttcttaaagataaaaaaaattgttgttactactatatatgcccactataattccttttttgtcactataattcttgtaccattaattcattcattcaatatgtgtctctcaattttgcctcaaacgattgtggcttgtgcagcagcattggaaggatgattgtgatgtaacccacattgtccaagaaaatagatacatgtaactaacaagtggttttaaatttccttggcattgatacaagatatgtacaatttcacactaaattttaagatgattgggagagtgattgatctatggttaaaaattatattccttctcatgaagtaatatcaccttagttttaccttggacgattaatctatattattttccttctcacattgaaccacaccattttaattttgcttttgaaagattaatgctacataacatttaaattattataaaccacatcatattatttgtttgtagcttttttcagtatttaaattattataaaccacatcatattaattgtttgtagcttttttcagtatatagtcaatcatatgagaaattatataaagtacatacaaaattatattgtccaattatcttacatattatttatgttattatcatacgaaattttcatagtaatacacaaggtttcatctaggtattcagaatctttagccggaaaaggtatctgagactacaattatgaacagagggccgatcagtggagaatatatgtattgatatgataagagtttattgtgttgtttcaattcaaaaaagtaaatactataatatcacggattctcgggttgctttaagttgtgttccattcttttggtctcttttgtcctcgatcgatcgtttcgttgggaccggtttgatagagaaaggacgtagagagtccagtccagtaatggagctggcacttgcaacggctgaaactaaatcggtgattatatattctaattctatgctgctgggctgctagctagtgagaggtcaaacgtatcatctactactactctactttattcaattcctccaacaatggcttaggtttagatgtagtaaaggccaatgaatggagtgctcttttaggtttaggggaggtgcatcatatcaatcgcgatggaaaagcatcggccaggagataaagagaggaacaccggccggagaccaaattaaccccgccctctactagctacctgatcgcctcctgcaggccttgccactatctacactacacatgaaatttaatttatgcatatatatggcactccaaattaagtaagacatatagtactccctccgtttcacaatgtaagccattctagcatttctcacattgttaatgaatctagacatatatatctatctagatttattaacatcaatacgaatgtaggaaatgttagaatgacttacattataaaatggaggaagtattatattatttcagtggactaaaacactacgacaaaattaagaagtaagcagtgttcttgtcacaccttcttcgaacacgcaagaagttcattatttgccaccatgcatataatatatgtacacgatatgaaataatcatatatagtgtagatcttgcactaaaaactgggaaattttttggggggggggggggagagagcttcaactaaaccaaagcaccgatagatagtaactgattatcagctaaatcaaggagtaatgttgattgaaattaaggtactctatcgatcgaatatatagatgggctgtaggagtatatatagaataatgatggttgaggggtggcgatcgatcgagaagaaaataaagaaatgaagaagaagcaatatatgcatgcgcattgatatagacatacatattgagatgcaatcatctaatgtgatcgatgattataatagacgcaggaaataattaatagatagatgtgctgcgtatatatacactgttgatgggtggtaaaaacagcgatccgatgagaaagatggatcatgcatatacaaccaaatcggagtacgtagctagggaggtgtgttgtggtgggcggtggcggtggcggtggagaaatcgtgcagcgtgggcaggtcgacctccccgcacctccggcagcggccggggagagggaggaataatgtactagtcccgacggtggcgcggcaggaggggcaggtggcgtgggtccccagccacgtatcgatgcaggagacgtggaaggcgtggccgcagtgcggcagcaagcgtagctcctcccccccggcgaactcagccaggcagatggcgcactccgcctgctgctgctgctgcttgagtgcgaaggacacggtggggagcgcgtcgatggctttcttcttcaggcctttgggtgcaggggatgtagcagccggtgtagtagtagtggtggtggtggtggtagcggcgcctcggcggcggcaggcacagcgggccacgagggccaggccggcgacgcagatgagggcgcagaggagggaggccaggatgaccaccatgtccgagtcgatggagatggccgccgccggtgttgccggggactcggcggagtggacgagaactcgcattcttttctgctcgacttggatggagccgcctcggcctcggactgacaaatcaatcaatctatcggagtgaatgagtttgctctgctgcgtagtagtacgtggaggagagtagtaggagtatatataagccagacaaaggcagcgcctacgtggacaccgtcacacgtggcagcgcggccagctcacccgacctctctctctctctctctctcttctcctgctgtccccctctcactttgaaacttactgtaagcaaagcagcagcaagggccgtgtatgtagtatgttcaatgtacacacagattattcactacagaaagaaaggattacgggaggtagggttatgacttatgatttctgaattcctgattatcactccattaagtgattcttcccagtcgcgtaccaacaaagaccaagagacgacgagcatgctataccgggacgggaggagggagccgattgcaacttgcaaatcaaagcgcgcacacaaaaaaaaaaggacatggacggccacctcaccctgtcccccaaaagcacccagctgcctacactaccattgcaaagaaagcatcaaacctctcctcttcctccgacttcttctttaattttgttgcctttctcagctccctacctagcttgccatgttgccaattgtcaacaattccaatcctaatcccatcctcaccctcttatcatcaactaaaggaagatatttctcagcatgccagtctccaaaaccagatgagatattttctcaacatgcatgcttactgctgccaacactgcactctgctcacacctgaatctatatattctcagtccaactgacagggtccacaacacacagaaggcattaacgagctacaacaggtgacccaaatacaactgcacaaatggttttcaattatgaactcatccaattaaaagtagtaccacttacttgtttaaggatgagaaatcggccgtgcattccaatgtgcccaacagcatgctatccggtcctccggttcttctcacgatgcaacatccatcctgtttcaatcccggaatgatcaacacccaactcgtacgtactacttctatataggaccagccacttcagttatcattgcaccaaaggaagaagcaaaaggaggaaactccttcctatctaaaatcccagaaagccaaacaacaaggctgcacgcccaaacacatcaacttttcttcctgcgtacaatcatatcaaccaaagcattccaaacccccaatccttttccactcatgttagaccaaaccaattacgaatgatctctatctttgaatatttcccaagagctcctatgcgatgccaacaaagccaatcaaatgcctaaatgcaaaacctgtgcatctctgggtaaaacgaaacaatgcatgccacagattagcacttcttttcgtatgaactatcaaccaagtatcaccacgttagaataacagcactgcattggtctctggagtaacagccacgccgtgaatgcaagacaggaccagtataacggagcaaccaagcacttaaagccccaagccaaaaggtggggacaagtgcagcttatcacggtactttataccaaaaaagtagagaaggatgactattgagcacaggaccaagaaagttcagtttcaatctattttgctggttttcagcccataggatcctggtagtatcaatcttggtccataccatcagccatgtggtgcacgatacagcctatggctgaatgcacaccaacatgatttggtggtatcatctgtgatgcggataccttagtgttggttactggctgtgtctagtggccccaaccgattggttactatacacagaatcagaatattccgtccccatgaataagaagagctacaattattaagtttgtagttctacatatgaaagcaatagagtatctacaggtttctgtaaaacattgcttactgatgagtgaagcagtacagtttaaaagagttgatggattgatgcaaaaaaaaggaatacaggaaagggcctagttgatcaccacagaatccccctacctccattcattgccttttgatcacagatcaaacctaacatcccattttccatccatataagcattaaaagtccaattgttttccctgagttggaaataaggcatctgcaaacaaataaattttcttttagaaaatccattaccagaagacagataatttaggctaatgcactgtgtgagaatgactgggaggcccaataagtataggcaaaattttgaggggatcagagccaaggagataattgatcatttgatttccattgaccttttttgtttggcatgtcaccaagaaatgaaagacacctgtttcaccattgggtccatattttcagatttacaggaaaaggtagaaacctagttattctaagtcaatattgacttacagtattgaccctgtgggaaaccaggattaatgcacaattcaggggtgtggttccacatgatccttggaaggtactaaacagtagtatatgccattggctgctgatagctttggtccgtatttcaagagaaaggaggaagacagcacggtgctcagccagcttgccaaggtcttgactgcaagacgtagataagtggatgtagatgggtgagagacaaaaggtctcgggaggtcggtggtaagcagaaggttttggtgcaacgttgctagtgatgtttcctttcactgagagtgtttggtgagattgtaagtgtctgtaatctgtaatgaatgaagctcctttacaagacatggatgcccttttagttttctagaactcgtggtggaagttgttttgattgaaaggaaagagacatttgcataaagaataaagggagacaaaatgctagataagcacagaagttgtgtgggtagagctagaacattgtggctgtaacgtttagatggtgatggtgggcgtgcatatatatataaagaagaataaagaaagaaaaagaaaagtaccttgtgcaagagttgatatccaagtttgagcctgacatcttgaccccttttgagatcaagtatggtccatgctaactcgacggcagcagtccgggcggtctgctcatgagggtaggcagcattggcaagttaaggtaagtaaggtagtatactgtacaagtagaataaaagcaagtagagacagaccgggttgaagtatttgtcggcgaggaggcgtcccttgaggttgatcccgagcaaggcgttggaggggaaggggatgatagccttgctggcacggagggtgtaggagaagttgtcccatgctagtggtagtggttggttgttgcggaagtggatggcgaggcctaggcctagattggcggagagacggggatagaagttcctgaagaggagggcgagataggtcggggcgccggtggcggcgtggatctcgccgtgagcctttccttccgccgccgccgtagcacaagggaatatgaatgaattattaatcgatggtgaagagaatgaatagggagtgagtaggcgggatatagtatagtacctggaggagcgcgttggaggcgatggggagcttctccttggcgtggatgcggaggccctcctgtgactttgactgcggacgtgacccgccgccgcgcagccgcagagaagtctccatgccgcagctagggtttaggatgccgccgcgagccaagacgacggacggccggccagtggatgaggggggaagtgaccgtcgttactcactcggatcggatcagatcagatcagactagatgggccaaaactaaccataaatataggcctttctcatttcgatgggcctgaatggtccatatctcaggcgggctgggctatacaaattcacaagaagaaagagcagagacctcaatttatttatttattaagataatggaataacattttggcattcgctcaacgaattacaactaattattataaagtccacacataaacaaacacatcatacacatcggccatgtataacgctccactcggcctgtgatcacacggctccacgttagagccgagccgagctggtagccgaatgcgtggttccgcaggccagaaagcgcgcttgaagagggaatgcttgaagcgccgcgcctgggctcgggagacgcgaagccacggctcgaagactcgcgttcgaggagtcagagccccgcgtgtcgcctcgtccggtcagtccccccgtgcacataccccaaatccccatatcgttgtggtcgtcggcgccactcatcgccatcgttgtggtcgcgtcgccgctcgctagatccaccaccaccgctgctccccgccaccgctcgccagcaaatccgccgtcgttgtggcctgcgtcgccagatccggcgagcatgaggttggatccgctccgcccaactatctctcatcgccctctgctcgcctagggaaaatgagaggggatatgagaagctcgcggcggcgtgagggggctgggaggggaacggttggcggggaaggggaagggtctcgttggcggggtggattgggagaagaaggagagcgccgacagtgtcagaagaagaagatgatacggctcgggagtcgggagagagagaataaaaatctatggagaagacgagaagactcgggagagagagggggagaggtgacagtgggtccacatgatgtttaagggtgcatatatacttcttttagttattatagggactaaaatataaagttttaataggtttgataataagatacaccacaaggctgacatataaatagatagtggctgaaatgcaaaatacgttttggagttgtttccattgtggttaatgtgatctttgtgtggttgtatcctacgtggtgttttgagaccactagtgcttgtggtcttcattgaacatgcccttacatgactcaatttaattatttgcctgaaatatatatggactagtagcagtttcatttttctatattctcaacaagaaaaagaaacaaaactactaaaagacagaacgggagataacagatggatggaatggcgttgctgcaaatctacgccaacttttcatgaaggaaagacggaattccaacctaacctaaccttaatttaggaccttgttagggcatctttagttcgcgaaatgaaaatttttgtgtgtcacatcggatgtttgaccggatgtcggaaggggttttcggacacgaatgaaaaaactaatttcataactcgtctggaaaccacgagacgaatcttttgagcctaattaatccgtcattagcacatgtgggttactgtaacactttatggctaatcatgaattaattaggctcaaaagattcgtctcgcgatttctcccctaactgtgcaattagtttttcttttaatctatatttaatgctccatgtatgtgtccaaagatttgatgcgatgtttttgggaaaaatttttaggaactaaacggggcctaagcttctactattttcttttgaataaaatttcgatcgtctttcctgcttcaaattacacgtactactttatcttctttttggtttactttcagaaaggaacaagtaatctattttgttgtagtagtagtagtatcaaacacacacaagtttgacgcgcaccggcaccgcccctgtaccgaaattgtttggtcgcctttatcaaaagacacacacgctgcctctctgttgctgctgcggtgtgtgtgctggtgctgcagctgcaggactagtactagcattcatttcagactgcaacgtccgacttgaagcaagtttatccaattgctatggacgctactgttatcgattcgaaatgataaaagcaagcgtcaaaaccatacgaattttgtaacctgtgataaaaatctagtagtatttgccaccgaatgtttttctgggatgctgtgtaccgtgttgttcgcaactaaagtagggggagtcgtggaattctaaacggttcgtcaaaggggagaggaaaacggaggccaacaaatgattccattctatcccatttacgttagggatacaacaccacacatgatagtagtagtagcataaaataaacaaaaaagaaaagaaacgttttcatcttttctgctttacagtagtaggagaaagctgcaggagctctccctcacactcctgatgtgatgagtggagagagtcccccactgctgctgctgctgctgcgcggggcaaccggccaccggctgcacctcctcgggtcggggatttccgggcttgaagcagcagcactaggaaggtaggtagggtagggtggatggcgtcgtcgtcgtcggggcgtcgggttggggggcctaggggcggcggggagagtagtcctagtccggcggcgggggcgggggcggcggcgtcggggggtcgacggatcctacggacgcagacggcggggaacctgggggagtcgatattcgacagcgaggtggtgccgtcgtcgctggtggagatagcgccgatcctgcgtgtggcgaacgaggtggaggggagcaacccgcgggtggcgtacctgtgcaggttctacgcgttcgagaaggcgcaccggctggacccgacgtccagcggccgtggcgtccggcagttcaagaccgcgctcctgcagaggctggagagggagaacgaccccacgctcaaggggagggtcaagcagagcgacgcccgcgagatgcagagcttctaccagcactactacaagaagtacatccaggctcttcagaacgctgccgacaaagccgaccggttcctctcctctttcttttactcctcctattttacagtactatatacgtctaattccttcacaattttattttttattaattcctaacactgacactagtaacaccccctcctctcagtgctcaactcactaaagcttaccaaactgctgccgtcctgtttgaggtcctcaaagccgtcaatgtctcccagaaaattgaagttgatcaagcggtaatcttcttaactataacttgattatgcatttcttcattttcttcttctactaacttgtaataaataacctctcttgcagattttggagacacacaaccaagtcgaggaaaagaaaaaactttatctcccttacaacatcctcccgcttgaccctgacagcgctaatcaggctatcatgcgatatcctgaggttcccattcttctcaaaccctacctatcttaatcttacgtatcttttccaactcattctgcattttttattctcctcattttacagattcaagctgcttttcacgctcttcgtaatacaagaggactaccgtggcccaaggatcatgaaaaaaagcctgatgctgatcttcttggttggcttcaggcgatgtttggatttcaggtaatcacaccgccctcaggctcacccactaacttaaccattattttccttctcttcacctatctgtcacttatttgcaattcaactatcactctgcagaaagataacgtgtccaaccaaagggaacacctcatactcttacttgccaacgtccatataaggcagattcccaagcccgaccaacaacccaaggtctcactcttactcaacgtccatatcggtgcttgtgtcattctggtggtgcttgtgtcattctggtgtttactcttttctttttcctcacattttcagttggatgaccgagcactggacacagtcatgaagaagctatttaagaactacaagagatggtgcaagtaccttggccgcaaaagcagcttatggtacgatatttaatctaaaaatacgaatatgcacaaggtctctcaagcttgcttgatgtatcactatcagatggtcatttcctttccaggttgccaactattcaacaagaagtgcagcagcgtaagctcctctatatgggtctttatcttctcatctggggtgaggcggctaacctgagatttatgccggaatgtctatgctacatctatcatcacgtatggctgatcccttccatttttccccttaaaattagtatatggtttttaccaagctagtaggcctggatcttaaagttgcgcaagcttcttacctgaatacccaatgatggtctggtcacaataaaattgacttatcggacctttttctttgtacaaagctatttccaatttgccatatttggtttctatctacaaagtagttagctggatcttaatggagtccaggctccaatgctgatgatgttcctggccataataacattgacttacctgacaatatatgagagttgcacacagctattgccatacacaaagaatcacattctgctcacgttgataatatgaggaagcatatcttggatggaattcatctttccccatcatgtcaattatgatgggatatttctgtatttgtaactcttgtgatgagattattttggtgagtgctgactgtgtaatattgttttctcatagatggcttttgaactatacggtatgttggctggaaatgtgagtccaacgacaggtgaaaatgttaaaccggcttacggtggtgatgaagaagcctttttgaagaaagttgtgactccaatatacaaagtcatcgagaaggtaccccccacccccccaaaaaaagtatatctctgtttccagctccatcaacttatacactcaagccttttacataggaagctgaaaggagtgaaagtagtgaaaggagcgaaaggagcaagacaacaaaatctaagcactcacattggagaaattatgatgatctaaatgagtacttttggtaagcactagcctaatttattctgagctacttttatgagttttagtttgttgtttcaaatttatgagctacttttctaaggaaacctgtgtgattatttctgcatttattctcaggtcaagagattgtttcagattaggatggcctatgagagctgatgcagatttttttaagaccccagattatgcttatcatgatgaagtgagcggagtaagtcccttatgatacatacctacctatattactttcatgaagaaccttcagcttagtaatacttctgttagtattccattcatgaatcacataggtggtaaaacaggtctatattattttttataacaaaccaaaacaattttgtagtatacgtcttcatagggtattcttggcactgattttttttaaaaaacttgtggtccaggagaacagaagagttggtagtggccagtggatgggaaaagtaaattttgttgagataaggtcattttggcacatcttccgcagctttgacaggatgtggagcttcttaattttatctttacaggttaattgccaatccatgccttctattgctcatgttttcttggttgtatggcttattagaaaatataaatgtttgctgtttttatgtttcatgcaggccatgattataattgcttggaatggtggtacaccaagtgatatctttgatgcaggagtatttaaacaggttttgagcatattcataactgctgcaatactgaaattgggtcaaggtatgctggtgtgagcttcctgttatgcagttgattgtggttaggcatttagcatgtgcgtaacatttgttttttgaaacagagaggaaaaacctcaacctcccccatctcttttgtcagaaacaattagttttgaacaaaatccagttccatgccatgctaccagaaacacatttaggaactcccagagaaacatgttggcaaaggaaccagcagacgtagatcagttcatctcaaagattttctagaataagccaaaaaccatataaccatcaggagcaaaattactccccaccaccaacagaaagttctggctttgacagcaccatcacatcatcattgcagtcccccaatttgattccaccacccatggagttgaagatttcacttgccatacgcatgagcaacttagctctttcctctgattcctgcaaccgtgaggtggatcaaatccaataacacagcgagtgaataatatcagtgcgatatttcagcaacatatctaaaacatacaatatttcaatttctggctttccacaaaggccacagaacagcagcaagactgacaatcaccagtttttgaatttgcttactgaatcctaacagccatcccccaaacaaatatgagacatgatgataaattgcaaagccaaatgtgcaatccatcacactccaaacaaaattccactcaccagcctcttttcaacaaattacccttggtttaactactgtttctcattattagctgcaggaaaaaaacatttttaggtaagttctttccacatgtcttagtgaaggaaagagcaggtatgcagtcttaaggctctatagaaggaattgacagtaaaatccttaactttatcaacagtaacatggtaaaataaatgttatagagcgagggatactgttgagatagatacctgccccccaaaacatgcacctaacatgatgatggcagtagattattgtattttatggatgatattgttttatgggtttaataattagcttccaatgcagcaattctggacatcatcctgagctggaaagcaagaagaagcatgtctcttgctggcaagctgcgctacatcttgaagttgatatcagctgctgcatgggttgtgattttaccagtaacttatgcatacacctgggagaatcctacaggtcttgcaagaacaattaaaagttggctcggtgatggtcagaatcaaccatcattatacatcttggctgttgtgatatatttagcaccaaacatgctgtcggctgtgttatttcttttcccagtccttagaagagctcttgagcgatcaaatcttaaagttgtaacattcatgatgtggtggtcgcaggtagttttcctttgtcagctttattcttattgttgattcttgataccatttaggtgctaagataccaaacatacttttcctacagcctcgcttgtttgttggtagaggaatgcatgaaggagcattctcccttttcaagtatgttcacttctataaaacattcttttgttgtttatgcttgcaccattctctctctgaggactgttattcttctaggtacacaatgttctgggtccttctcttagcaacaaaattgatagtaagctactacgtggaggtattgttttcaacttgtttcacctctcttttataagatatgttgccccagtatgtttgtgcattcaaattcatagagtgaatggtataccaaaggatttgtaggaccctaagtgttagttcagtggcggagccagcggcatcgtctaactggggcgacgaagaacgtttactagcaaccggcaattttttacatgtgttgcctaggaaaggacagtagaaacaccagtgacggagcctgggaggtggctctgccgctgtgtcaattgataaactcatataattgtatgcgtatgttgtttgctaggttcataaaatatatatttctacctggatccttgaacttgagagaacagtacattatgtttccatatcctttgcaagttgaaggaccttatgcaatgtgatctttaagacatcaaatctgtaaaaagttaagaatgtgtataagttagtcacttgtgctaatcttggcacccccaaatttaagttctaagaccatgggaaatttaggtggcttttaggccttacggtgcagctactgagctaccagccatttctgggtaagttttgcccttaaagccccagtgttaagagtaaaacttgtactgttccggatgacttttaggatattcttgcctgtaaaggttcctggtgaaattgtcatcgttacttctttctttgttaattcatctgaagtttattactcggtgtcctatgtctgacctgcagatcaagccacttgtgcgaccaacaaaagatataatgaaggagccaatacggacgtttcaatggcatgagtttttcccacacggtgtgcctcctgaaatgatgatttttgtatcaacagtttgagcatgtacttattctttttgttctacaatctgcaggaaataacaatattggtattgtaattgcactttgggctcctatcattcttgtatgcttctgcccttcttgattgttgtgatttgtgaacacaagataactatccagttttgacttgactgattcaattgttcaggtatatttcatggatacccagatttggtatgcaattttctcaacattaattggtggtatatatggggcatgtcgccgtcttggtgaggttagtaaagttggccaataccctgctttcttgtatggtagacttgaaggctttgttagtatgtgaagttgttttaagcttcttgctttgtgcatggttgcctaatttatttcatgccatgtcatgtcatgtcatggcatttgggttttgttgtgcccctctattgttgtttattgaataaataactaaccatagatactgtctttggtcccattcaatcagatacgcactttaggaatgttaagatctcgcttcgagtctttgcctaaggctttcaatcaacgcttgattccatctgattcaaataagaggagaggaattcgggctgctttctccagtaaacctactaaggtgtggatttcttgtcttttagctctgattcgacgccatctagatgcaaattcccatgagaatatttatgtcacaatctatttttcttctctggcatgcttcaatcactttagacaccagaggatagcaaagaagaggaaaaaatagcagcaagatttgctcagatttggaatctaattatcacaagctttcgtgaggaagatctgatagacaacaggtgtggcatctgatatctgcccttagatatggattgacttattttgccttcttgccaaactgttgtttattttctatttgggcagagagaaggatctgttacttgtgccatactgcaaagatcgtgacatggatataatccagtggccaccattcttgcttgctagcaaggtatatgctttctattcagctcctattttccatgcttcctattttggtgaaatgaggtacctatgtttcattttgtttatttggctgaattttcagatcccgatagcgttggatatggctgcagacagtgaaggaaaagatcgtgatcttaagaagagggtgaaatcagacccatattttacttatgctatcaaggaatgctatgcttcattcaagaacatcatatatactttggtggttggtgcaaaagagagagagtatgttctacattctcacacttaaaaatcagattcaaactcagttttttcatgagtaactttatggcacataaattgcagcgtcatacagaagatttttacagtggttgacgaccatatagcacaagatactttaataaaggagctcaacatgagtaaccttcctaccctgagcaagaagtttattgagctgcttgaattgctggtattaaactagccataatggttctgctcctgttggattgcagtaccactaattctcattcgttaaatgcagcaaaagaataacaaggaggaccagggtcaggtcatcattttgttccaggatatgcttgaagtggttacaagggatataatggacgagcaactcagtgggtgagagctctagttatcattcaatgcaaactagcaaagtatcctcggctgttaaagtttgcttcatacacgatctgcttcctttccaactaatagagtttgttttgtatatgatttactttcacttacaaaccaacgaaaggaacatctgatgcttattattttcatataaatcaaatgggtattttccttgatctttgtaagtttgtaattaggatgtactatgcgcaatgcctctcataaaatggtggcttctgaaacaaaaaccaaactaggcttaagatataacacggtgtcttcttaaaaaattcgaacaatacattatgtattatttatcattgttgtcatgccatacctttggcaatctcatgctgttgatattattgctgttattattctttatattatgtcatatgcattatcatatcttttgtgcagactacttgaatcagtacatggtggaaataatagaagatatgaagggattacaccacttgatcagcaagaccagttattcactaaagctattgattttcctgtaaaggaatcacatgcatggactgaaaaggttatatcttttacctgcttatttatttatctatgtttagagcagcctgttgctttatactgtatttatacctttcctattggtttcagataaaaagacttcaccttctgctcacagtgaaggaatctgctatggatgttcctacaaacctggatgctagaaggcggatatcattctttgctaattctcttttcatggacatgccaagtgctccaaaagtccggcacatgttgcccttctcgtgagtgctatgctctctaagatttgttctatgctcattattattattattattattattattattattattttgagctgtagtgtacagttcttaattcaccgtgtgctagattaggtttcctgttcattttttttactggtaataatagattatcattgctgtgcatggaaaatttgaaagtcgatatcgagtttagaaacaaacatgtttttcttgtctttctggaacaaggaaagctcttattatcttactccaataaaatagttgataagtccagcaaaccaaagaaaaattgtgcagatttggtattcaactgtatatgagtatcttgtgtcctgttttgattataattgttcttgttcaaatctttgcacggtcatttgaatagtcattcttcttctgaacaaaatacatatatacgtcgcacaagtttgtgtgcatccatagaaatgcttcaatgcatagctctctttggcaaattccatcttcaagatttgatgttctaattaacatctgacttgctgtctctttaattggaaaacttgtgcactgcagtgtcttgactccttactacaaagaagatgtccttttctcttcccaagcattagaagaccagaatgaagatggggtttctattcttttttacttgcaaaaaatctatccaggttctctcgaaatgtcaaaatatcgaggtttacatgactcaataattcccttgaaatcctcctggatatcaaaatattttttgtttctcggtttccttgtagatgaatggaaacatttccttcaaagggtggattgcaatactgaagaggaactccgtgagacagagcagttggaagatgagcttcgcctttgggcatcatacaggggccaaactttgacgagaactggtattttctcctcaattctctgtcatagcttttacattttattctcttgagaacaactttcagatagtaatgtgtttaggagtttgattcattgacagctgttgcacttccttacagtcagagggatgatgtactacagacaagctttggtgcttcaggcttttcttgatatggctagagatgaaggtatttcttagtggctgagcctgtttcttgattctgaaggctgtacacttaattcattggttttgcttgcttttcctcagatcttagggaaggcttcagagcagctgacctcttaaatgatgaatcaccattactgactcaatgcaaagctatagctgacatgaagtttacatacgttgtatcatgccaacaatacggtatccagaaacgttctggtgatcaccgtgcacaagatattcttagactgatgacaacgtaagtgacaattcgagaattaagattgaaactctgaatgtaggtattaagatcaagagttgcatgccaaactttcattagttcctcttcttgaattcccccacttcatttctggtttttcgctatgattgtgatggttatgatttatttcctttttgagaaactgatataaatgggcaacttgccatttacatcacctctggaatatgaattaaggttagtagtgaaactatacaaatttgcattagggttgcaggattgtctcaggatacaaagtatccatcactttgggtacacatgtttgggaaatctggatgtctattatgttcttacttttgtttaataagttgaccattgtgatacattatactccctccgtcccaaaatatagcaatctcgttgtactgggatgtgtcccatccagtacaaggttgctatattttgggacggagggagtattctattaatgtgatggttttccaactgattccatcagtgattgaaaggaagtttttctctggcagttatccatcacttcgggttgcctatattgatgaagttgaagagccaagcaaagacaggaacaagaagatagaaaaggtttactactcagcgttggtgaaggcagctgtaaccaagcctgacgatcctggtcagaaacttgatcaggtgcttcgaaaatggattttaatttaatcattttttatgattatggcttcatgtgattgcattagtacgtctttattagtcacttcgttagattacaaccctattcgtaggttgtagttggactggttatgaaggttaagaaagttttgaatttgatgaatctacaagagaaactcacttgagtacccttccaattaagtgttctacaaatacgaaagataatgacttgtgttggtggtaaactggtaatgcggtaaacataggagagaatagcttaagagctaaggatttaaatctgcacacacaccttatattttggagaactggcattaactaaaatgtcttacataaagtaccaaatggagtattaatttataacgaatcgatgaatttatgaaattcctaatcatggatacaatgtttggagcagatgcattttctgatctggtggtgatacctactaatataaacttttctttgcgggaaaagggaacatataaaacttacttgaattgcatcatttgctgtgtaggacatatacagaataaagctaccaggtaatgcaatgctaggtgaaggaaagccagaaaatcagaaccatgcgataatatttactcgaggtgaaggccttcaaactatagacatgaatcaggtaaacagcactgatgcttctagttttgcaaacattttctattctgtttgcttatgtaggcaagcataataggaacattacatggaggagactttgaaaatgagaaatctgctgcaagagtttctgaagaaacatgatggtgtgaggtatccatcaatacttggtgtgagagagcacatattcactggcaggtatagctgtgaacttgcgcttccccataaatttgtgactatgtatactacttctcatttaaattaccctatgatcgcatgtttgcttttgcagtgtttcttctcttgcgtggttcatgtcaaatcaagagacaagttttgtcactattggacaacgggtacttgccaatcctttgaggtgattcatcttactatggatatattttttttttagaatacgcaggagatctgcgtatcatttcattaagagaggaagacggtggaggaaaccccccaccaaggtcttacagagacaacaccaaacacaaagctcacgcagcaaaaagctcacatagagaaacacacacaaacgaaatttggcttttatgtttgtatggatttggctttaatatgcccatgttagtatgtgtatttttttgattcatatgtttgttattccttcatttagtaacagaatttggataattgcattgtaactaagcatgaagattttgttgatgttctccttaactgaacatctttctctgcagagttcgatttcattatggacatcctgatatttttgatcgacttttccacctcacgaggggtggtgtaagcaaagcatccaagattatcaatcttagtgaggacatatttgctggtgcgtgtttaactttttgccattgcttcttggttgtgggaaagttgaaatttttatgttaatatctgtctcattgtgtcaggattcaactcaacactgcgtgaaggaaatgttacgcatcatgaatacatgcaagttggcaaggggagagatgtgggtctcaatcaaatctcactatttgaggcaaaaatagctaatggtaatggagagcagacactgagccgtgacgtctaccgacttggacatcgttttgatttcttcagaatgttgtcctgctactacaccactattggtttttacttcagcactatggtactatctttgccgtagattttccagacttctgagctatcatttaatcctaacctttttagttcctcttttccttttcagatgacagtgtggacagtgtatgtattcctctatggacgtctctatcttgtcctcagtggtcttgatgaagccttggctactggaaaaaggtttatacacaatgaacctctccaggttgctcttgcttcacagtcttttgtgcagcttgggtttttgatggcgttgcctatgatgatggaaattggtctggagagaggatttagaaccgcattgagcgactttgtactgatgcagctgcagttagcatctgttttctttacattctctctcgggaccaaaactcactactatggaacaacgctgctccatggaggagccgagtatagagctactgggcgtggatttgtggtgttccatgccaaatttgcggagaactatcgactatactcacgcagccattttgtcaagggtattgagttgctgattttgctaattgtgtatgaaatctttgggcaatcatatcgaggagctatcgcgtacatcttcattacattttcgatgtggtttatggttgtaacctggctctttgcaccattcctatttaatccttctgggttcgagtggcagaagattgtggatgattggactgattggaataagtggatcagcaaccgtggtggtattggtgtaccaccggagaaaagttgggagtcatggtgggagaaagagcaggagcctataaaatattctgggaagcgtggaattgttctcgaaatagtgcttgcattgcgcttctttatctaccaatatggtcttgtttatcacttgaacataaccaaacacacaaagagtgtcctggtaatttgctatcttcatttaatatttcttggtgttttcctggtctatgcttattagcacaagctattgaaccaacttttgaatgttatttaatggtctttccaggtctattgcctgtcatgggttgtcatctttgtaattctgcttgtgatgaaggtaatccctagcattcatattttttcttcagtgtttcatcgcggtgctcatgagcaacattgtggttagaacacagggggtacccttttttctgtatgacaattataattttagctgcacagagtatggtagttttcttgctatattcctatggcagtaaatgctagagatatgcctttgcaatacctgaggaccattgcggtcaagttgctttgctgatgataccagttgttagaaacctgttgtgttgtgcacacagactgaaccttggtttactcatgtttgcagaccgtgtcagttgggaggcggaaattcagcgcggacttccaacttgtgttccggttgattaaggggttgatatttataacatttatctccatcattataatcttgatagcaatccctcatatgacagtccaggacatctttgtttgcattcttgccttcatgccaactggctggggtctgctgttggtaagtggatatcaattgtttttggcctgtaagcggctggtttggcttgcttgagctgatgatggttgttgggttcaggttgcgcaagctatcaagccagtaattgtgcgcatcgggttgtggggatcgatcaaggcgcttgcgaggggatatgagatcatcatggggctcctgctcttcaccccgatcgcgttcctcgcttggttcccgtttgtatccgagttccagaccagaatgctcttcaaccaggccttcagcagaggtctgcagatctcgcgaatccttggcggccacaagaaagaccgagctacacggaacaaggagtagtagcctgtctgccattcactggacatgtattctgttgtgtcttcttccctcctgttgctgctgtaatttgttactcctattctactactccacttatcttgattgagagacccaaaaaaaaagaaaaagaaagaaagcgtgcattttggtagttgctaatcgccgcgctgctgaggccgcttattgtgcggcccagggagcgatgtgttgtagaatagtacagtagaatgtgtaaagttgctgtttggtagtgatgtgatgtgtgtgtatgaaaacaaacttgggaagagaaatgcaattgtaagacaaaataccttgcctgatgtgatgaatgtttttttttttgacatgtgtgatgaatgttttagttcttcttcttcttgagatgaaagcagtacacgggaactggacgcaaatatatgtgcggccgtcaccgaccgagagttccgaacgccgaatctgggccgtccacgtgtcttcctccctctattcccgtctttctagttgtagactagtggtagtacaacgagagagagaaccccccaaatttagtggtcatcttcttcttcttccgccctctcaccttttcaatccaatctaacaaccaacgaaacgaaggagtctttctctagctctagggttagggtttgcggtcggaacggaagttagtcgaatcggcgcaaatcgatccgatccgatccgccgtcgattcgaccactccgccctccttccttccttccgacgcagacgcaatccataatactactactctagatcggatcccctcctctccctccctccctccctgcatacgaacaacaagagactactccattactatattagattgattgattaggggaggggattgctgattaatttcatctctctaaccctagcagcagatccctctctcccctagcaactagcaagcagagagaagcagccgcctccatggatcctaatcagatgatgggccgaagcttccccatgtgggccgccgccgacgacccttccgcccagccaccgccgttcctccctccgcccaaccgcggctggaagcgtaagaaccctagcaccgccgccggtggctaccagccccccgccctcggcgacctccaggtgcagaaccgcgccaaggctcgccgctggttcaagaaccaaagcggaggcggaggcggaggcggtgggccccgcaagcacttcttcccccggcccaaggccgccgccccacgcaacaccacctccttcatcatccgtgccaagcgcgccggtggcatcgcctccctcgtctccccctcccctgttacccccgccgttctccccaccccacgcctctccccctcccgcgagggcctctccgacatggctcaggcgcagtggggcgtcgatggctatggctccatgaagggcctcatccgcctccgcacctcccctcaccccgccaacccctccgatgacgacgatgatgccaactccagcggcagtgacgtcgaggagcatgtcgaggtggagcgccgcctcgaccacgatctcagcaggtttgagatggtctaccctgccaggggtgacggtgtcttcttcgaggaggaggatgactatgagtatgaccaggaagcccatgtggctcgcctcgaggaggagaacctcaccttgaaggagaggctctttttgatggagcaggagcttggcgacatgaggcgccgcctggaggcactcgagtcgcgttttgcagggactgatggtatgcctattgagaattcagatgcagttgcagttgaccatgacaaggagatggctcatcccatacttgttcagagggatgatcttaggactgagattgctgctgatgcagcagggtcagacaaggctagtgcacaagacaatgcagaggaggttgctgatgcagcagtgtcagagaagatcgtgcaagacaatgcagatgttgtagttgcagggtcagagaggactggcgaagagatcggggttgatgcttcggagatggattgatgggagatggacactggaatgcaatagcggttatcagtactgtacatacataattgtcgatgacagattgaggccgcgtgatgtggacttgttttgggaggcttacaattgtatgttgtcgcataacaagtggatcatcgtatttacaatgtaatatgtttctaccattctgtgctatctttggtgtttctttgcgtatttgttatgatgataccacacagcacaacttgtagtagttcttaccttctgctgctgctgctgaaagaggtagaagcgactagatgaatttgttactacatcaactattaatgtcattataatggtatcagatggtgtcatgaacctgttacttaattatagatagcactcatgaagctattccttatttgcagatagcatagcactctcatcctggtcacttgtagtgatggatgctggtcggggtgatactatctcttttgtcattgtgggtggtcagttatgcttgttgggatgatggtttttttgatggtatcatgtgagcactcagcactgtatctgtatgttgttttgtcgtggtgaaattgttgttagtatgttgctgctggctccatggatagagagatcattatgtattaatccaatttattggtatttggctgtgtgctttcttctttgggctcagtggatcggtaaaatggcatttggctgtgtgctttcttcagtcggtaaagcgaaaactagtcgtaaggacatttcaggcgggagggagggaccatccgatccgattcgaaactgaactgacagacagtcccctccattagatggagggagaatattgttgggcctttgggcttcgtgtgacaggcccattagattagacctagatctgtctcgtgacgagggagaagactagaggagggaggaagatggcgatggatgagccgcccaagggttggaatcccaactatggcgtcgtcggcagcggcgaccggcgactggccttctcccgccagctctcctcctccatgcctcgcctcgcccgctccgactcttccatctccatgccccccccgtccctcgcccccaccggagccatcaccttccgctggctcgccacccgccccatgcgccgcctcgccctcctcatcgctctcaacgtcgcctactccgccaccgagctcgccatcggcctcctcactgcccgcgtaggtcggtaatactaatactactgctactgctactgctactcattactcatctcaatcacactcttctccattcgtttcaggcctagtctccgatgctttccatctcacctttggttgtggaatcctcactttctccttgtttgccatggctgcctccagaaccaaacctgatcacctctacacctacgggtgcctccctccctcaatttactcctcttttctttaatcttccactcccactgattcattgctgcctttattcagctataaaagattggaggtccttgctgcctttacaaatgccgtaagcttttcaacatgtcattgccatgcccatccctctacatttctctactactatatatgagtttattgtgttttccaccatgcatattaaacggggcataggaatacgaattttaatatgccgcatatctctcccattacactaactatgtaaaagaaccaccaatcgtaccaaatatacaatttgtcatagcttgataaatgtttggaaacctcaagcaacagatgtatgcctatttgacattcaaataactcgtgtaaagtttctaattagaaaaactgagtccacaatatacgttataacgtccttggtcacctggttatgaatgtcagtatatgcctattcacctagtgacttgttgacattgctgtccagtatggacatcctgaaaaacgccaatacaatgggagagaaagcaaaaagaattattggcagaaagtattggcaatctctatcactataataaaaaaacattatattctttctagaatgatgcatttaacataattaattactaatattttctggggaacacacaaattaaactgaagagcaataatcatatagcaccaaacctgtcagatcagttgtatataatctataccacaagatttcaacattatcttgctagtgacatttttaattttgatgctaaatctacacaaataaacataataaattgactttaaggaaaccaacctacaataaagctgacccatagaagccacacaaatgctatgtaaaaagagattctgaatatttcttgtatttttttctctcaagatagtgctctatacctgcgctaaaaggttttttcctttctgaacatttatgaacatttatagtttcagcaacatcgtcttggataggaaaatgtcttgcacgtgtatatacagggcttcataattcaggataaaaagagcgtgggatgtaaatatttgagaatagattctcactatttatcatgggttatattttaattcagatggcagagttctcagctgctaacatgagcaacattattattccctcacaataatatatatctccagaagcttctaaaacttgggaaagatatattggtttgcataaatgaccaatgagaaatgaaaatgctttgcagagctcctgccaagaaaaaaaattgtgccatcagcaaattaagaaacaagagctttatttgatgaaaagcaaatacatccagcgccaatagtccatcaaaggcaaaatctgtagcaccatttactaatgctgaaaattttacatctacacaaattgtggttccatgttatttccaatattcagatggtgcttaaacatatatgcgtattgagctgcagttagcaacaaaattgaaaattaatgcagtagttatgggtaaggtaattgacatggaggattatatgacactccaaggaaaattgacaaagtatgttgtaggaagaagttttgtacaatgagcagattgcgtatctcaggaagcttggtaatcagcacaattcaagggagctcaatggtgtacctgacctgaaaactcaatcatgcgtcaaattggtaggaaaacaatgtaggtccaatctgaataaaacttacaatataaattgatccatttatgtacatctatgtactttcaaagggcaagtcacaaaggcaacacgatacatccaaaaccctattacagcctacataacatttcagcaacagacatgtaatcacaacatttaatgggctggaaaaaaatgctaatgaccttgaagcaaagagcaacatggaattgaatctcagcacatctccttttataaaatataagtaaaatgaagcaccacagattcaaagagaagctcactccacctatagacaaagagagagagagaggacatgatctttgtacatccaagccagagagatatattcatgtatggattaatggacattgctgctgattttaattatacatgcggtaagtttgtagctatatataagttcacaatgtgtacacaaactcaggaagacaatgtgctaggcatattatctttccaaggatcaaaacaaattcgatagagaacatcagtattgatagaccacacaactgagctctgtatatcagataccttcagatgcttgttggctgcttgaatgccaatttacagaatatgcaagcataaaaaaatcagaacagattgttcaccatgcaaactaagaaaatacataagccggaaagaagcagtttgacatttaattatgggatgtcatttgaagaagaaatgttcagactgcagattttcagctatgcaaccttgtgaattatacaaaagtaaaagctcctgcaggtacatcatgaagcaacacatgcagattttcagctatgcaaattttcatattttcatgaagctgaaaacgcatgacatgtttcaggatatatctatactaacatcctcaaatgcgaagtgcaaaactaccatacaaaatagcagtgcagtaatgagctcatcatatccctcgaaagcaacagaacctgcataaacatggaaagatttgttagtccagtacacatcacctagtgcaacttagatgaattgaattctagtgtggactattttgtttctatgccttcgataatgggactgatatactgtcaaattctcaaaataatcaattatcattcagtttcagcaaaatatgaaattaatggttaaaaagcttaccatcatagaagaactaaaatctctctaaatacaatgtgtttagtgctttttcttcttgcggggaaagcaaaatcaatccccaatgacacaaaccgcacaaatttcataaagtgcatgcagttttctaattttcatcttacctgcaggaattttctcaaaacatataatagtttttttgcctaaatacttgcttgcatatgggtttgtctaaatttagaaatagggatatgacgcgtgggcctgggtgcatgtgatttcaccataggattgctaggcaaaactcctcctttttatattagtatagatatattttgaccacctccatccatatgcttcttctttgttctagacagctcttcctgctcttcctgtctttctccttggctgttgaagcactacatgcatttatgcaagatgagtctgagcataagtaaatgccttttcctttttgtttagtgtaatataatcccaatcgttttggctaatattattattcttctaaaactaaaatatatatatatactttcaggcattatctcattgtttctgctgtcacaaaccttttggttaatttacttggtgtttggttctttcggagctatgctcgtgttaacataggtaagtactccagtatccaatccagagtcacctcttgtacagatgccagtgtatacatatctaaaatctaagtttcacaatcgaaacatcattgatcaattgttgtctattaatgccagtttacaggaaagcagaggatatgaattatcactctgtatgtttgcatgttcttgccgattcagtacggaggtatgagatactctcatgtcactgtgcctcttcccttataatatttgctctttctgtagtcacgaagttagttatttttagttgacatgtgtaaatcctccatcagtgcaggcttgatactagcttcctggtttctttcattggggtaaatctattctgacgaattttctgtgcccctctaatgttacggtcacttttagcttggcacttaatcctaaaatgactttatgcctactgcttttaagggttgaaaatgcggaagtgttgtgcctgggaattgtttcagtggcagtgttcatgcttgttttgccactctttaaggctactggtaatatccttctgcaaattgcaccaggcaatgtgccaccttcagctcttaccaagtgcttcagacaggtaggtacacggtttggttttgcatattattcagttcattttggcaagcccaaagcttctttgagacatttccgtatgtattgtatttgctcaccagataactgcgtgcgaggatgtttctgaagtatgtcaaggtcgattttgggagcttgtacctggtcacgctgttggatctctcgacatccgggtacatcttttacgccaagcctcctaacactaacagacagcttgttgtggttaccctagggcctattcactttgatgtcattttcaaccataccatttttggttaaagttgccaaaaaaaatgtctacgtttaatttgttaccaaatttagtaaatacataaaaaaatcctgctaaaaatttggcaatattgtcatcttgccaccaaaattttggtattaccaaaacttggtaaggtttattttggctacaatctaaacaagcccctagcccctagtgactgagttcgcgttttggttgtgttgtgtgtataggtgaagaatggtggtgattgccagtccgtgctcgactatgtgcatggattatatcaagatttgggcatacaggacctgaccatccaaaccgatgaataaggcatcatctagtgtagaaaggagtcataggggaaaaaaggatagatcaaactctcgcagtgtattgcttgggcgtgcttatttgatagtacggtatatcgctttgtactcgactgctgcagtttgtactcagatttactcagtagctactacaatttgtactcacttaagctcgtttgctatggcatcatggttgaaattcgttgacgatcttctctccactcgtcttttaagatgctgagaattattgttattattgatattaataaataataatgagtgacctatgtgcatctcttctccatggtggccgagtgtcaccatgttatgcaagtgtcttcatcaaatatcaattagtatctcatttcccttcattctagcatatgtccagttcaaaaactacattacaggcagttttcaatggcaaacaaaacacagaacacgatgtgatgtttaagctttcggtgcaatggaagtcgtctatgtatgaatctcacgtgatgaatcacatatacagcaaaatgtcaggcaggtcagctctgctcagtggtcaggtgaggtgctgccgcttgtatctgaaacaatgagaaactatctccacacctcaacaacactataccctaagctgactgagggaatccggaccaacgaggtatattcgtcttcgactactcttgtaccggaagactactactcctttataagctgttcttggaatgccatcctgaaaaacagagaaaacagacatacatgaatcatcacacactaaaaaaacagagaagtccaaagaaaattatagaccattcacggggctgatgtctatctagatcaaaactgcaaactgaaacattttctactagacctaacaatcaccactgaaaacatcagacacaaaattgtcacttgacctactttgacaagagcattatttatgaataaaaatggggtcaaagaagtaaaccttccattcttcaaatattccaaattgacgagctatccgctcaaagtcttcctgatcgttatactggatccttacatccgcatccatattgtgggctttcaacgcggcatcagatccatggagaggggtggcactagcgacgtctttcccaaattggatcaggaacttgtcctggtgttgccaacataaatattaggcatttgctgcaaactactgtttcaaagtccaaacaaattcttacctccttgaggtagctcaggtcctcagaattccacttgatctatagccacaaagaaggaagaggtaaaatggtaaatctctgcactaaagaatttgcaacagttaagcaaaacaaaaggtgatggaaggtttgcatacatgggcatcatttagcttgattggttccaagtactgtctgaagaattgccccatgcttgacccctgaaaaggaggtatgaaaatctattagtgtaaattcaagtcatccatacttactggctcaaagactaaattactatccagtggctactagtgtgcagaaatgtggtaatttttgcattgatgaagtagccaacatacatgttcgccaaaattgtatgttctgcagacttccgggcgaataaattgccggtctctgtgtacctcttttagcctcacccagtcatcccaataagtaaagtcttgttaaggaagaaatatatggtagatggaaaatattgtatatgctaatataaaaattagtaggcaacagtaaagatatgctttgggccacttaggtgacagctcaatccatgtaggctttgttaacatccatccaagtccaggaaagaaatccgaccggtaaagagcttctgcaaaatgtttatgtaggaaaatgagtagctttccctattaatgcagaacagaacttttatacaggtctatcagagtactaacttgggtcgtaaacaaattgcttttgtccattgtcattccaggaagaaacggccatgattgtccttcaataccacagtgacaggaatagcagcaaagcaattagatacattgcagatgaaatccttggctttccaactataattaatatataatatacaacatacttatcgttatcaagtaatttagctgcagcctcgaagtagtcaaaaaaatcaggggcgatctccatatcatctattagcaaattattaaccataaatgggatggaaagaagacagatcaaagaacaaaatagttataagagcatccaaggtgtaacaccttccagaattattactcgcgcaaagttgtgtttgatgaatagctcatccaaggcccatttgtaatgttctgaaataagaaagttatcaggacaaggatcagtggtatcatcactatcttcaatcagcatacatcaatcaaggaggaccacctactggctatcttgtaatatgctatcaactctcctggcctttcagtgcgcacaggttcaagatctaaatgctgcaacacataccactgagagtcttagctgaaaaatatttcccatgtttcttacaaatatcggactgctgcatgcctatgttatgtggaggggggaagctacaatcattcaaaatcactataaaagtacacatgtgataatatgtttacaatcatttcataacagcaggaaatattgtattcgtggtttcattctctattagcgctgaaggcagagaacaagattttctcttttttgcaataacacttcattgctagacttcaatctgcactctggcactttatgacagcatacactgatgattatcctaccacttccactccatgacatggttgttactctacatatggccatttggtttttcaggagctagcatacccgttattttatctaaactaaattgtaatgataatttgtcaactaaatacaagttcagtactgtcaactgagcagtcacctcagtgagctgccatcccttcccgttgattctctatatatggattttattacctttgccatactatttcatattggaccaattccactgccccattccagaacagcatagggtcactactcactacagtacagtggcatcaagcttccctttcaaacaatacatccacaagtttggggtatgattatggccttgcttctcactgctcagtttatatccattggacctagagtttccctgatatgactcatggatcttaaagttcaagggcaacctcaatctaggtccacttaaaacctcttggcaggctacagtttcttcctttctttttaacccctcttttgcaacatatcatcttatgtagttacttggaaaaggtcctcagacaatactccagctatgcttgcaatattacagaagtatatttcttcttatttttaggcaaataagtgtagaggaagaaagagttccacacctgcatatatgttatttcattataactcaaagcttttttcttcacttctccatttattccatcctgcaattacaatgagcaatggaaaaaaatccacaaacttagagagactgagagcaagaactgaaattgctaagaccagtacctgagatataaatagtggaaactttgaagccactgatgtctgatacctggaaaaattattaagaatcattaggtcagaagggtattatacgaacttaagctacatggagctcacaatgggattcatatatggattaggaagtaaaatgtgtaattttccttgtgacatcgcatggacaatttctgagaaaaagacattatgcattcatgcaccatgagcagcgtggcaattacaatgcagcatgattccatgcataactttcacaggtgatatcgactgagtgggttttggcaccaacttaggagttagaaaaaacaataacagaccaaaaaaaatctggattctgaaaataaaggaatgaaggcacaaagcatacttcaggatagattcaactgtcctttgcaaatagtctggtcgattgcaagccattacaacaacagcagcaacaggagcctgcttatagaaacagatcatattagtcaaatatagcagaggaatgctagcaatattagcactgtacaaaccacattgttgtttactaaggtctgcacgctcctttctgcatccaaaagaaatgttgaagaaatagttagaaacaaaaagtagcatgtggtaaagtaaaatcacaatgacgggttaaatatgtagatggcagctgggaggattgagatcatacgatgggtcatctttatgtttgagaaaattagttcagcacgttgcgaatgggtgtaaactgaaaggcactaccacatatgagaatggcatgtgggacccagagccacacgccagtgacatgtcaaatggtaatgagaaacataacctctatatttggggtagatgggaggattatgaaactattattttgtattcaacgtgaagatgacaactagaatgatatgtacggtcctgatgttccactattatattttgggcatttatgaatgattgtttaactaaacaactgactaactgatggattgacatcattttcgtagttccatttttttttaaaaaaaataagtagttgtaaaaatatttccagaagacatactaattttcagttctattggttataggaaaaaaaacatgtgaatttcaagaagaaacatcgggtcatatgttgttgtgttgtcaaccatgcatgtcacatggaggtcgatgtgcatgaggctccagtatgagtatcacaaggttaggttttaatggaaacattaggaggcgcgagaaaaatcaagtaacgtagcaaacacttggtagcaggaacagttgtggctgaaatccataggtgaaagataagaaaggtcattttcatactttcgagatcttggattaaaatcttgaggtgtacacgttcttcgtcttggcgtatcttcatctctgttgttaccaaaacatgagagacacaacatttataggtcgcgaatagtagaggcaaggcttaaattagtgtgataaatgtgtggtaccttccaacgcgacaatcttctcctgctgagagctgacttgatcgatcaaggagcggagttgactggtgcattggttttcggatttttcctaaattgcaattagtgagtttgagcagaccaaaaatatatactccctccgtttcaaaatgtttgacacagttgactttttagcacatgtttgaccgttcgtcttattaaaaaaatgtgaaatatgtaaaactataagtgtacatgaaagtatatttaacaatgaatcaaatgatatgaaaagaataaataattactcaaattttttgaataagacgaatggtcaaacacatactaaaaagtcaacggtgtcagacattttgaaacggagggagtatattgagatgggggggggtagagagactgactgcttgtgcgaggcggtcggcgtagtgggactgagtagaaaaaaggcggacctgaaacaaggagaaagaagccattatgtgtagtgagagagtagtagagtggtggttaggagaggggggatcctgatctgaagttgaagaagaagaatcagattgtgataggcataggcatacttggatgtagatgaaggctgcagcggcggcgacgaggaggatgcggaggtcgcaggggctccgcgccatctcttggatctcccccaacactagtctagtagcctttgatttgggatgggatgttggggagaaaggggaggaggaggaggctactacttggtagtgggcagggcagagcaggtgagctcgcaattggatctgcacctgcaccgtacctgcacttcttcttcttcttattcttgtgcggtccggaggaagtggaggtggatcaggtggaggaagacgccgcctgcgccaccgccgccgcctgcgcgaaggaagagttgagcgggcggtgcggcgcgaatagatggatggcggcggaggaggggagtgggtcggcgccggagccgacgcggagagacgggcgacgtcgcctccctcctcaacaggggaagtgcgcgatttgggcgtgggagaaaggagagaattaggcagggttattttggtctagagaaaaaaataaaatagaagtaataggcctaatccagacccagcaacaagaaatgcagttcggtcatgagctcttcctcctcgtcctatgcatatagcgtataggttgtatttagaatttagagacgactacttgggcgatgcgaggcgcattgcaacacaatcgcagaggcggcgacttgacgactccctctcgctctagggtttcctcccctccctatcgtgaaccgccaccccaccccctcctccagcgggcttcgccatgtacggtcacctcctcctcctcttccttctctcttatccctgcaattccatcccgccgattcatccattgctttctttttttttctacaatactacgaatccacgcttacttgcttgcttatgcgatctcatcaatttctcgattcttttagggacaatttcttagtccccatctaaaagtaggtcactttgctttgctatcataatatgatatgatatgatatcatatgcctagtatttaggatacatgtacgtccccccctccctacaaaaccaaacccctcccccaaaaaataaataaatcagaggcagtaatagctgacttacatccaaattgataactgcaccaatgtggtttgtaagattattttctaatgatatgtgttatctagtagtttgagcatttcataagctgtcaacatttaattagtttttgtttatgaccactaatgcgttcgcatttcgactccattcaccttttttagccttaagtcctgtttagattactggtatttcttatctgcgcggttttctttatgtttgggttattttatatgaaatggggattgagagatggggggatcttctcctctctttttttttcttttctctttttgggactctggattatctgaagggcaatgatgggcaatgatgggagggggggaggggggtttggatgggtaggagggatcaaagaggctacgaatgatggaatccaatccatacttcgcagtgaccgcaggcagtcccttggatgtatcaaagagggccaggatgatggaaccaacccctctctatttttggagccatgggcaacagtgctgctgatggcaccaatgccttctactagccctaccaggccaacttacctagtgcaggagctaatagtgccatccagaacttttcaggggtccgtctactagggctcccctttgactgcggcgatcttgacatttgcaagttctttgttgggctggacatagtggactgcctcttggttcacaagaatggctgcttcaccgacgaggcttttgtcgtcttcccatcagccatgcaaggagagtttgcactgcaccgcaaccggtagaacatgggcaggaggtatgttgaggtgtttagatgcaagaagcaagagtattacagctcaatagctgctgaggtgaaccaagacggctttttcgactcaaagtatcgtcactccccacctcctccacggcccaagaaaccagctgaagacgagcaacatggaatatattgaggtcccattcttttctccaacaaaagtcggatgaagattaagatttttgtggtaggcttttcaaactgctaaacggtgtgtttcgtgcgaaaactttctatatgaaagttgctctaaaatattatattaatctatttttcaagtttataataattaaaactcaatcaatcatacgttaataccacctcgttttacgtaaaaaacttaatcttcatcttcaagagaaaagaacaccacctgatgtgctcaagctccgtggcctgccctactttactaccgctgaagacatcatcaagttctttgtagagtatgagttgacggaggaaaatgtgcacaccgcgtaccgtctagatgggaaggccctctatggagttctcaacaacaggggttgcgaagacagccatatgcaaggacaagatgaccattgggacaaggtacatggagctgttcccatcaaccccagaggaggccagcaggacaaaatcacgattcacgagccaggcaatgaactatttgatccaggcatctactttgccctggccttgagcagctgtgttccagtttagctttcactttgcatgcttagggcagtcccaacccataatgtctataagtaatgtctatagtgccatgtcaataagacatcacaatagaaactacaccccacaacccatgatttcttagagtgggccattaataaatacatcatctctcttctctgccaatcatatttattcttcgcctattatgaagacattattctctcccaatgcaaaacttgatagtgtctagtgcataggttctcgtgttgaagctgtgtcttgcatgagacccagtttcttccactcttcactctctctctcttaattaatatagtgccacataagttaaaagtcctacatgacaatgtagttaacgctatagacaccatattaggtggagggtttggactgcccttaaactatatccctcgcctttaggtttgtgtgtgtttaataagtatgcatcgtgttgctaccctgccacaaaccgttggtgtggtgactttataagaaaccgaattacattttttaaaagaagtggtgtattataagatgcctgcgcttgtaacagcagttgcgccttgttggatgcattttgtatggcaatggcatgatcacggaagaggattttgatccctctcgaggggatatcctctcgttgtttgcatgtcactcaaatggttataaaaaatttgaaaaaaaattaagaaaatgtattaatatgtgatatatcactccacaaaacatgcaagtaaaaattcaacttctacatctcgcaacgaaaaaaataaatttaactctgaatatacgttaactagctgttattcaatttgtttttttcgttacgagatgtagaagttgaatttgaacctgtatgtttatggagtgttatatcacatgttaatacaccttcccattttttttaaatttttttataaccatttaagtgacatacaaagaacgagggaatatctcctcgagggattaaaacagtttccccatgatcactgtgtttccttgtgagtttgcgacagatgttctttttggtgaagcaggggatgaagctcgcctccactttataactctgttccaaaagtttgttattgttatactgatatatagcttacaaaaataatctgatctattctgccgtgaacacataataatgttcttgtgaaatttatgtatctatatatgtacatatgccagctaacaacactcagaagaatgccctgtgctctgtcctggatgaattgcgcgtcctgggctgtatctaaatatagatgtagtttaagcatcgatcgatcgattaagctgtctggttgcttaattaagaagagcctcgtgtgtcctccaaatttttggttttgtcgagtcgaggatgaaagcttttgtgttgatgacatgaatggataggatagatgaatgaaggaagggatgagctgcttctcgtggaaccccagcctgcggtgctggcatggcagcaatgacggcggcagcccgtgcagccaggccgcgcaggcggcgtcggcgggggcgggcggtgcgaagaagttcacgctggcgcagctgtcggcggccacggacgggttccacgagtccaacgttgtcggcgagggcgggttcggcagggtgtacagggggcgtctcgaggaaggcggccaagggctcgtggccgtgaagcagctctgccacggtggcgcgcagggaacccgcgagttcctggtggaatgcatgatgctcatgatgctgcaccaccccaacctcgtctccctcgtcggctactgcgccgacgccggcgagcgcctcctcgtctacgagttcctgccacgcggcagcctcgacgcgcacctcttcggcaggaggccgcaggagcccccgctggcgctggggtgggcggcgcgcgtcaggatcgcggtcggcgcggccagggggcttcgctacctgcacgaggtggtgacgccgccggtgatctaccgcgacctcaaggcgtccaacatcctgctcgacgacgacctcaaccccaggctgtcggactttggcctcgccaagctgggccccgtcggcgacgacacccacgtgtccacgcgcgtcatgggcacctacggctactgcgcgcccgactacgccatgagcggcaagctcaacgtcaagtccgacgtctacagcttcggcgtcgtgctcctcgagctcatcactggacgcagggccttcgacgccgcctcctccgactcggagtcggaggaccaccagcgcttcctcctcctccgggactgggcgcgcccctacctcgccggcgaccgcaagaggtgcttcgccctggccgacccggcgttgcagggccgctacccccgccgcgccttctaccagctcgccgtcgtcgcctcgctctgcctccgcgacaaccccaacctccgcccctccatgacagacgtcacccgagccctcgaccacgtcgcctcccagtcccagccatgggaagacaagcaaagagccaccaccaccacgcctcctcccaactcccaaccttaattcctccatctgctcattctagctactagttgcctagctctctctctctctctctctcttggttggattcccatgttatgttcccccttaatttggaaggccatgggtgatttcactgattgattttcatcattttcttagttgctcttcatgtatatatattaacctttaacaactcgcttgtacacatttttaggtacaaaaacaaaaacattaattttcaatttagaactccctccaatgttaacaaactattatacattgctttttagtactccctccaatgctccaatcgaataaatttgacagggatcaaaattaatttaatttaagttgtatttggtaccaagatatgctgcccatgtagtgtaacaagtaagaagaggagtggaaacgaaaaatatggcgacggcgggcgtggtggtggaggaggcggtccggcggtacgcgggcggcaagccggcggcgctcctcccggcgttgttggggctcctgtccaggcagcagccatcatcaggctgggctcgcgctctggcctcacagctccacgccgacgtcgccaagcggcctctctccgccgccgcctccaactccctcctctgctactacctccgctcctcgcgcctcgatctcgcgctccaccacctgcgctgccgctccacgcccagggattctctaacctacaataccctcctcaaccacctccctgcctcctcctcctcctccaccaccttccgcctcttccgcttcgccatgcgccacgcccacgctgccttccaccccaacatcgcttccctcctctccctcctccgcgcctcctcctcctattccgaccacttcctccacatgatccacgcctatcttctcaagacgcccgcctccattcacacgcctgtcgccaactccctgctctccctctacgccactttgggggatttcgcctccgccgcgattctgttcggcgaaatgcccgaccgagacgttgcgtcctggacctccatgatcggggcctgcctgggatccggctacgccgatcaagccctacgcctcttcagggagatgctcgctgacggcgcgctgcagccggacggtgtcgtggccgtcgtggttctgcgcgcgtgcgccatgctggaggatgtcagggccggagcctccgtgcatgccgtcgccacgcgccggggcttgcaaggggatctcttcgtggacaactcgctcgttgacatgtacgccaaatgtctcgatctgcggtccgcgaggaaggtgttcgaccttatcgccgtcaagaacgtggtgtcctggaacaccatgctctcaggcctcgtgcacgctggcagctaccccgaggcgctccatctgctggccttgcagattggggtggtgggcgacgagacgacgcttgcggtgctgctgcagctgtgcaagaagaagaggctagggggtcaggcagccaggtcggtccatggcgcggccatcaggaggcggctcttgtcgatggctctgctgaacgcgttgctggatgcctacggcaagtgcggcctcgtggaggacgtgctgaggctcttccaagggatgcgcgagaggaacgtgataacctggagcacagtcatcgccgcctgcgctcacaacgcccggccacacgccgcgatggcatgcttcgtggcgatgctggtgactggggagcgccccaactcgatcacggtgctgagccttgtggaggcctgcggcagctgcgcggagatgtgggcgtcgagacgcgcccacggcgtggccgtcaggagcggattggggtttgagctggcagtgggcaacgcgctggtccacatgtacgggaagtgcggcgagctgggcgcgtcggcgagggtgttcgacacgatgcccgtcaaggacgtgctcacctggaactccatgatcggggcgctggggatgaacgggcgcgcacgggacgcccttgcgctcctgcacaggatggaagcggaaggtgatgaggtgaggccaaacggcgtcacgatgctggccgctctgtgggcatgcgctcatggagggctggttgaggaggggattgggtgcttggaaagcatggcgcggcagtcgctgcagcctcgggtggagcacgtgtcgtgcgtggtggacatgctggcgcgcgcgggggacctggacggcgcggcggagattgtgaggaggagcagtggcggtggcagcccggcggcgtggagcgcgctgcttagcgcgtgcaggaggcgcggggatggcggcggcggcgaggtggggcgaagcgcggcggcccgcgtgctggagctggagccgggcaagtcggcggggtatctcatgtccatgggtatgggtttaggcaaggggtgggcggcagggatgcggtgggcgatgagggagaagggagtgaaggtggagagcggccacagcgtggtgcagcacgccggcggaagcgagcggttcgtatggtgggacggagcgcacccacggcgagcggaggtgtacgccatgctgcacctcctgcaccgccacatgaagcaccaccatacagatgcagacatacagtacatatgccaatgccaagttgacaacaattaacccaattaaaaaaaaaggcttgccttttgttggtccctcccggctctatgcgctgcctcatccatttctgatttctcctttctcccctcgagtctgatcctcccactaccaacgtccaccggcaccgcaacttgctgtcctctcctgccggctggtccagctccatctctcttcttgctctgcctcccccttcaatttaattgattcctccatccagatttcgagatcgagatgaaggcagtgatgatgcaccaccatcacgcggcacgccctgcgcgctgtccaaggcctatctcttcctcctcctcctcagccctgttgggtagcagaccaaccagagtctcctccccatcaaacctgccaaagttgctcataaaccggcgacacatcacccctcttgccaccaatgctccccatgctgttgctgaagatgatggcgccatctcttttgctaatgcaacgccaacggagcctcccatgtaatttccagtttcctacttttatttacttgcctacccacatgcttgcgccctttgcatttgctgtctacatttactataatctttacatttcggaggtgcatgacatattttaccctttcataaccatccaacgaataaacaaccagtgacttgcgtcccgggggtgtcagaaatgagctaattcttctagctctaccagcagttcttggccaagctattgatccattggcgcaattgatggagactgcatatattggtagattaggtaggtacctactggacctgctatatcctatatttttaagtgttcttttcttaatggtttatcaatcggcaaataggtagatacctgcaccatcattgtctacactaatactctataattcatgctgtttgtttcttttatattatgtaactaattcaaacagcaccaaaaatgatgttctaggtattatggcgcttgcccttcataaagtagctcttgggagtgctgaattatagccatccttactgcatgaaagcaagctgtcccttcttttgccattcatccttctttttcatatattctgaaggggctctggagctagcatcagctggtattggtgtgtcggtttttaatatcgtgtctaagattttcaacattccactgttgagcattgcaacctcatttgtggcagaagacatttccaagaatgctagcaagcattcaagttcaggtagcagcagcatatattaaataaatattccatttctcacatatttataaattttttttgtgcacttgcttcaacattcaagcaataaaacctgacttgtggttatgttgcaggcaaattggagctgtcatctgtatcttctgcattggtcttagctgctggaatcggtacaattgaagcattggcattgttcctaggatcaggattgtttcttaaactaatgggcgtgtcacctgtatgttttggattacgatgcctattcttgtctgcgatctttgttttgtagggaatactgtcgtttttatgtgcacttttggacaatgggtcactaatttgattcaacaattagttttcaattgttggaattgtcaggatatctcaacttagtgcttttgcaggcctcaccaatgcataaacctgcaaaacttttcctttcattgagagctttgggagcacctgcaaatgtgattatgttagcagttcagggaatatttcgtggattcaaggatactaagactcctgtattttttataggtaacttccaagaactactcttcatcaaccacatgattacattggtttgcattagttatattccttttagcagtcctagcaaatattttgtggaatcacaataatgtttccaatatcttttttttccattttccacaataaagggcatactttacgtccagtttcatttgattccagactcttctctgatatcaaatatctctcatattacactatatgatgtctgtaccatgttcttttaaaacatgtaggtttgggaaatctttcagctgtagtgcttcttcctttacttatttacgtctttcggcttggcataactggagctgcaatttctacagttgcatcacagtaagttctatattgatacctagccccatggaatccaagtaaaacaacaaaggtaaaaaaagggaatattttatatgaatatagcagcaaataactcagtttggttccaaataccaactgtttttacttatagacatgtttctaaaataatgaaatgcagcagaaaataaactttagctttccttttgtttttcatttatcagcaattcagcacacacatttaaattaccatatgtgattctggtcttgccataacagtttgtggctgttagcacatcatctgatgtttatgcagtttatttattcatatgttacatatcaagcatttttgctagttacaacttacaagtggagttctaactttattccgtccatgacataggtacattattacaattttgcttctccagtctctaagtaaaagagctgttctacttcctccaaggctggaccagttagagtttagcggatatctaaaatctggtgtctttttcgttcttctatctccccctctctcattatattcaattgttgtgcatgctaaatcagagttcttacactttcattgatctcagtgtctgttcattttgttcattctacaatgtgcggttaactgaagttcagattttctctcccagggggctttgagttctttgggttaatttgtcaaaatttccaattctggatccactatgcatttaacaatgatacctttatcgataacaagttaattgtaaagtttggtttttgaaataactttatatgcaagaaaaaggaaagactatcgtagagtagatggtgtaggtacggttactgctagtatattttacagatatgttgatcagcttgtcattgatagagctttcattcatgggccatgcccattctgtccactaatgaatgggctgttcagggaacttctattctccatattgtttcgtggtaccatttatatgtagtaaaatgtgctcaattctaggatttgcaaatatttgctgtcatattattggaaagataatgcatgtctatgatatgcatcctgagaacctccatgttataatttcatacttcttatcttgtttttccttttattgcacttaccaccatctataattccatcatctgtttttgaaatgcttaggtggcatgctgttaggaagaaccctctcgattttattaacgatgaccatagggacatcaatggctgctcgacaaggcccaacagctatggcagctcatcagatatgcttacaagtatggcttgcggtatctttgcttgcagatgctttagctgtttctgcccaggtgtgtatctttgattgtacatggtatccacacttttaaatcggcttcatttcacatacttctttctttataaattgtaatttacatcgagccctcaaacttctagcgaatactactaatacaaagattgttcctctagctcaatgatatatcatgatttgtgcaatcaaaatgttcagacttaagtttacttgcatttgtaggcaatgatagcaagctcctatgcaatattggactacaagagggtccagaagatagcaatgtttgctttgcaggtcatgtgtcatttctctgttttctattgtgaagctttgtttttcatgtattcatagatgcaatcgccctttcttgttaacatagaaaaatggagattttcttgcagataggagtagtcagtggattagctttatccgctggcctgtatacctcattcagtaatatagcaagattatttaccagtgaccctgtggtcctaatggttgtcaaatcttgttcattggtacatctccctactttatcatttagttatcacatcacatctattattctaatgttttttcttcatttcagtttgtatgtgccagtcaaccaattaatgctctggcattcatatttgatggtctgcattatggtgtctcagattttgattatgtcgctcaagctacggtatggaaacacttgtctctcttttttctttactttatattgatttctttgtcatcttttggctatacagattgctgttgggataatgtcatcattagttttgttatatgctccatctgtttttggacttgctggagtttgggctggtttgacaacacttatgggattgcgcatggcttcgggcattctcaggtgattatatttcttgttttgttgttctaatccggtgtaaaaagacaagcatgcatacatgatcttgcagttaaaaatgtttgcctttttgggaatgaatatcttgtgttgttctgtaaccgtaaaccatagccatgtaagtgatctctctctctctccgtgtgcgcgcgcgcgcgtgtgtgccctgctattttattgaactaagtggatgtggttcaactgtgaaaatgcaaattatagttcttgcagacttgggaataaacttgctacacatgccctatgttctaggttatttggcaattgattagggtgactgtatttgctaaaagcactatgttaagtaagcaatgtgacgtctatagcggtcgaaatatgttactgccacaataagtaacatatttgcatgttatcttgaagatcaacttattttctatatgaaagttgtaacctttcagggagcatgtaaactaattgactgttcagtgaattgccacgcatattttgcagtttatttaggagaacataactaatagtttcatgtggataggacaaatttctgttatttgatgtatatccatgcactgggcagtatattgtataagggtatcttcccaattttcatcacttttatgaatataacaattggcgataaagaatttttaatattatgtctgtttcccttttggagccttgtatttcatgttctgtaattgatctaatggatgctcttttatgcttttatcttaataatttgagaaatcgcaggcttctatggaaatcaggaccttggtcatttttgcatgaggaacccaaaacagaggtttgatgttcctatcttttacaccctggtattagtttataaattgtcttgtcctctgcattataattttttttcttgggtaaggctcttaacttaagaggtatagtgtcaaatcaatgcaaattacgataacctgttaaatttgcccgccgtcatttgttgagtatcacacgctagtcagctcaccttaaaagaagaatctgttagggaaatgcaggagcaaggcattcagtaggctcactagcctacagtcatggggattcatattgagaaaaatattttttttgaaagatccggtcgtattgagaaaaatatgagatagcctatccctgttgatttgatgatttgaggcatgcaacctaatatgttgtactgttgattttttatggccatgcttgtgaaggtaggagtaatagagaagggcagtatccatatttttctggttttcttttccccgcatgattctgtcggagcggtttgtgaatgtcatgataagtgcagccattgcataactcttgtgcagctagctggttgaagatggagcggcaactaagcagtcaatactacggattaaatgaacgagcgggtgattctgtaggtatttatgttcaagtcggtctgctaggagatgccatttttacttgctaccaacattgttcaattgctagtgttattactatgtgtagccgttttatttattctaaaggctcccttgtttcttgtggtggttttcgtttactgtgtaagccagtttgctgctgcgtaaacagcttgataagtttagaaggatagagaatttgcctttctttaacctgagaccacttcgaattatttttggagcaatgtatactaatactgtattattcagttcaaattggccctacgtagcattgtcctatgaaccgagaaatacttatacatactttagctagatgaattcaaactgcgtgagcggaggactttaataggcgggccggcagtagcggatagtcatcatggatagtcatcatgctactattagaagtgatgaaacccacgcccgattataaaccgaagacggtgaacgagtgaggccgtgtttagttgtaaagcttttctttaaacttccaactttccatcacatcaaaacttttctacacacacaaactttaacttttccgtcacatcgttcaaatttcaaccaaactttcaattttggcgtgaactaaacacatcctaactccggaaaactggattgattcataatataagggtatgtgcggtgtcacgctgcgcacgcatgggctttagaaggcgtagcatgaaaaaaaaaacaatttcttcctacataacataattaaatgttaactcaaggccacatccttcctaataattcttaagtgaaataaaacatcagcttgtttcaagtgaaacggcaacaacccatcatttacacattgatctctttcacaattcaccaatttaaaagtatgaattcaatgaaccacacctttgtgacacctttcttagagttatactcgtacgcacctaattgcctcccaacaaaatcctctatctcatgtaacgagcgtatttctctctgcaaagacatccacatcagtatgcaagttccattaggaattgaaaagttgccataaatatggaaagaaaattgagcactatatttaccccctaaaaatgatatttaaatgcactacagccatgtaaaatttctgtattgatcatttctaatatgtgaatcaatagtcagttcaaaatagctagtttgtattttgtagtgaaacttcatgacccgcagactacgatttttgagtcacaagtgtgcaggtttcttcttccattgaaaacattttctacttaatagttggccagtagcaaatgttgctccgtcggtgagtaaataagttggattgctgaaatttcccccttatctcctgcagtagtgtttcatggacagtgttacatgatgaaccatttcacagaagtctaccgtagcttgttggagggtatctgaatatttacctgcccaacatacatattcttcgatctgctcggaacaaagatccatttatcatttcttccctctagatgtgtcaaggattttgccggctgttcttatatatggacctgcgactagcagtgcagccctctcccctgctcgacggcggcggcgtgcgctggcggaggcacctcggggcatgatggcggtgagcaacgaaggagcaacaacgctgctcgtcgcttgaagcgttgatccggtgagttccccttttatttttagctcagcgtacttggttcctccatcctaccaccttctcgttccttcatcgccatgccacgtattggaacgacgacccctccgttttcagaataaagttccgcttcgttcccgttccttgttccgggacgaggaactcacccacgttccacgttccctgtgacttaggacctgccatcctcaatcacaacctcgaagtcttttctttgttgctgcagaaatgcaatttttactttattaatcctgaatattctgatttgcagcttagataaatcctgtagatttccttagagaagtgcaggcacttaatggaccaagatatttgatgcactggctcaaaaactttcatgactatataaaccactaaaggttcctaacatagtgaccgatgcaaaataaataccttgtaagaaatccacagagatcttctagtcatgctcacactcttctttgtattgaattacaaaacgaacttttcaatataattatagctccataaatcaagtcattctttcaacctacaaacaagaggaaaagaagcattgcttcgtcattgattcttgctcttttttttttcaaggccccattggatagtatgtgaactgcaaacgtttatatcgaactctaaatgtagcaggtataacattcagaaatgaatatttggaagtatgaaataatcatctctaaaggtaatgataaagtctgaataaaatcatgtatgtcgggataatgatttccggtgtacagactgggctaaagcacagtctgcttaagcatgctccaagccactggttagaatgcaccaggcaaaaaaaccccccaaaaaatatatacttcttggcatgcataacctcaactgtaaattcatacctcgaacatgcaaacaaacactattgaataaacatgttacacagaaagagattaactaatattctcaaattcttggttagaatccatctgtgccaataaagttacaaaataaaagctctgcattactgaccatcacgcattttgacaaaaaaggccttcccatgctgaacaaatgaatttgggaaataataccaaggaatgctaaacaaagaaaatggacctggacaatctttttacttacaaacatgggtgggaacatactttgagctgatctgttggggcgctagtgacatgtctaattgctcacatccaaagagtatgttacttttatatcatccaaggaaaagggaaatttcattctgcatcataagattctatctactaaacttatgaaccaaaacagcacaaggttctacatgcatccatgtaaacagtcaggcaatggatgaatacgggaaaaaatgcagggtgtagacaaatatcgagttgtcaattcattcatataattaactatgatgcaagacatcagataggtagataaaataaggtacacttatcatcctaagccagatctgcagtgtaaatcaagagaaaatatgcatcactaacacgtattcaaaagatggggctacagggcctagcctctcaagtactctctattttgtttccctgcaaaagctagcctggactaatccaggccatttcaacctccttacaaataaaatgggattagaggaatttttttttctcttctgttttttgggtttgcactgaatcttgtgtgggtgcatcaaagtgcaattttactgcactagtacaggtgatagttttttttttttaaaaaaaagcctgtagttgtgttttatctttcaccgggcacattgtgtttttgtatgaaaggtgctcttacctgaaaaaatatatgaagggtgattaactgtaatagtattttggaatttcacaacacataatgctggtgctcgatattgcaaatacccggcatagtgagctgtatgccatcttacctgagaaggaaaaccagcaacagttaggatagattgccaattcaccaggaaatgagagagaagtattgctgaatgtaatcccagatcaacctgacacaactcacaagcatacctgcactgctgcacaactgcaccagcacaatagcctgaaaacagcaatccaactgaagatgattgatggtgatcttcataaataaccccaactacatggcataagagttcatcaaacatgcatgtgaaaatccaatttggagaaaaaaaactctaccatagaatattctagacacacaatagatctgtgaaagtcaccgccccgtggtgattggctacaagaacatttttgtagagataatggaacaaggacatggaatgtgctctaattgatttataagcaccaagacattcggagtaaaaatccaacctttgggataaaaatccaccaagatgtaatgatcatatgtcatcctcgccatagcgttgctcctagtcgtcttcacaatcaagagtcttggaaaagggaagcttctgccatcaccgccgttgcttcctttcgtcagccacctccacctcgtcgaccagctcccacaccgctcattggacaccctgcaccaccgctacggcagcgacgttggcctgctgttcctccacctgggctgtgtgtgagcgctgttgtgtccatggcagagggccgccgagaagagggagaggaacaacgggaaggagcaggaggagatcggcgcacgagaggatgtacgaggtgaggaggacgcaggcggaggagatgtaggggcggccgtacctgccataccggcaggggctgctgctctacggctgcatcggcctcgggtcccgcggctatggcaccgtccacggcctcactcgggggctcaacatcaccactgccgcctcctcgagttcaacttttttttaataccacactaaataactctaggttttactcagactatctatactggagcaaaaggcatgctcactcgaatctcatcggagcaacagggcaacatcagtaactttttgtcctgcaatggttcaatgtaattttctgcaatacattttaaaaatgttttttacctcaaggacaagcagcatatgtaaactcacactctaaatctgcaagaaacccattctgtttggctctacaaatgtgttgagatcaaacagaaccagagttagctcaaaatctgggctgcgatttgaaccataaaaaccaacaccaccgactaaggatgggcatgttcaggttgtccagaaattacagaacattactccatgatgtaagcattgcatcgtgcagatcatctagtaataaataacctactccctccgtcccataaaaaaccaacctagtaccagatgtgacacatcctagtactatgaatctagacatacagcccagattcatagtactagaatatgtcacattcggtccaaagtgtgcagtgccctgtgctcaggggaaccatatttccaaactagaaccaactactaagccaatttataaatatattaatattgataagagtggccagaaagcctatatgcaaacgtttttctcttgaacacgtaggagagctgcgtatagggaagaaaccccaagtacacccacacccacacccacacaccaaaaaaattgttgattacattcgcgcctgacacctacaaacacaatgaccacaaacaaacctctaagcaaacttgagatacctatatcacattagagcgtccaacatttacaacagaggtagttagattgcctcttccattgtcataacatttaagcaagccagaaattactaatttttaattagattacttagtgcttcccaactttgagttctaacaaataggctaggtttccacagctggcaatgcagtcatacaaaagaaatataactgaacattctgaaagtatcagtaacttcaggtatatcagcctccaatatctgaattaccacaattcactagtgcaggaaagcccataggtgccagttcagaagggcctattattgcctgttccggcgctggcaccaattagtcggcaccaatggcaatgactacaattagtaagatggggaacacccaggcatctgaaattttctaccaaggtcaagatttgtaatctttgataaaagttttgcgatgaagattgagacatggagttatcacaaagaacaaaactgaagatatgtattgaagtacagaaatcgtacacaagatccagtgcagcactcccaactaaggttcttatttgacatgggatcatccatccaatatctagtaagtaacccccatccaccccaaaaaagatgtgcaaagagcaaacgaactttacactgtgacagctatagtagagttggtagacaaaggcaatatcaaagtaagtatactcaagttacccctcaccggtcctatgatgcatactgtggtgcccgagcagccattctagcaacctgagcctgttgttgtgccttgttcaccttggttgacaggacgcgttggaaaaactgctcccgtgcaagcgctcgcacgctcctgaggtagccatcaaatggcacagaaccctcctgaatggccttgtcaagcgcataaatggtgtcctcgagtgccaaatccgcagcagtgcactcaagcatctgcttagacagtacatctgcggtctcaattgcctcgtccgcttcagtgtcgccggcagcacccttggtgttctccatgacccacgcctccatgaggtccgtggccatcattacatcctgcaggcggcgctcaagtgcctccttctcctcccccatcttgcgcaccccatcagagaccacctccccccggctgcgcagcgtagcctgcatggcgaagagagtgtcgacctcagcctcgcggactgggcgcagcgtggcggcatcggcataggccatgtcaacgagcttagcgatggcattgcgcttgtagacctcagcggggtcttcggtgggtggggggcgcgcggcaagctggggcgaggcagggaatctgtagggggatggggagggggaggaggaggaggaggggtggacgcgagggagcggggtggcagggatcggcggggaaggggaagggggtgggggattggggctcctggtgaagaggggcgggtcgaggccgaacaggtgagagagggatcggacgagatcgacgaggttggaggaggggaaaacccaagagcggaggtaaggggcgttggcgacgaggccggagcggtcgacgagggggtggtggggcttgatgaccatgtcgcgtgttggggagaggaagacgaggggcggcgaccgcgggtagggctccgggagccagaggacagcggggaggttgtaggaggcgccggcgtggtggatggggatggtgccgtcggcctggaggaggtgggcggcgcggccgtcgttgtgggtgaagagggcggccttggggtggagcgaggggaaagcgtcggcgagggcgacgaggtggttgcggatcagccacttcacgtcctccgcgtagggcagggcggagggcccgcgctgggagagcgccgtgttcaggaactggtgcgcgtactgcgcgccgctcgccggagatggggacggagacggcggtggaggggccatcggagccggtcgccgccgctagggttccttccaccaccacaccttctctctcttttcttttcttttcttttcctttttttttcttttccttgcctcgccgagtcgccggtcgcctcgggttggtttgtccgcttttctttccactttccaccgcgttggcttcttcgcttgggcggtgacttgcttctgcatactttccctgttcccttcgtttccaaggaaccgaccgctctcgaatttttattattttttaaccttttattaatattatttatttttaaaataaatcctctccaaaacttatttacaaatttaaatcttttaatcacgccatagcaacaggcttgctagtgttttcttgccactgaccaaaagtttatatttgaaaataaattgttggattatttattttttttaattaaatattaaaaaggcttaaaaaaacatcacccctctcatcttaagtagtaataacaatttatcgtattttttaaaatatgtgggcactaaaatttggagaaatatattataataagttgtattagttgaaagctttttccgctaaacgttatggtacagggtcatataaggtcgtgccgtgtgcagagaagacagacaatgaaattgatttttatccggcctaaatgttctaaaagattctatgtaaattttgctagtcatcaatttaccaagactccttaattcgaggctttcataatctcatctcacacttgcatagttgtgtgttttatactatgaagtattcatattgtttaacacttatgcatataattattacgacgttctcaaaaaaaatataattattacgagggttgttcatcgattattgtgttgtttgttccttgcattgctaactcgatgttatattgattgcttatacacgtaatatctgataaattcaatccgtttttaaatcgaatatgcaccatttccaacatccgaaacaatccgcttcgaatccactcaagaaatatggtttaagatatggtatacctactatccgttcaaatccgctccattttcaccccttaggctttgaagtgaaaatttaaaaattatgcatctctaaatgtgtcgtcaccccaagtacattccttgagtgcgtcatattggcatattaaatctttgctcttgcactaaattagaagcttttggcactatgattctatgaacacttgtctttctaagaaaaattctctctccaattgagctgaaaatggcatctagcatagtactccagattttatgcaagtcgaggaatatttttacgctatgtttctagacgaaacaaaatacctattatattttaattaattccaattatacaaaaggttcagataggctaagcaaaaaaaaagcttcatttcgttgaaaaatcacatattcattttttgtatgaagaaaaacatgatgactcaaagaaattccctagcacgaactttgtaccgcgtgtattacttagaacaactaggaaagtaagataagataagcaagaatgaaaaaatatttgtcagaatagcagaatacaaaattaagaaatgcaaaagtgaagaaaaaagaagtgcctatatttagagatttatctatttggatgaaaaaaaatcatactctatctatagtattaacaaatatgtatcccaacctatctcgagatatttgtatcaatacctattcaaaagatcttatctatagtaataacgaatatgtatcccaacccgtttcgaggtatttgtatcaatatctattcaaaagaattttttttcctgtgcaaggaacacattttttaaggtgtccaacagccataacacgtttttacgatgtacgctatcaaattacacaaacttatgtgtcatgtagcaaaattagtcaagattctaaacaaactcacatcagactcaacttgattggtgaactagacatacaacatgggagtacaatatggtaatatgagttgccttgattgtattttaccaacaatagtcaggttgcaaaactacagcatcaggtcccgttctattgtttctatgtatctcgtcgtctatacctccccgagaaatatatcagaaatggctatgcctagcatctcatcttagttcccaaaatgtggattggtgtctttgcacaaatgctgtaatccattccactcaaaataatatgaccacgcaaatacagttatcttggccggccagtaaccctagattttaactaatcatcacttccccactcttacgcccctttcctccctgctatatgttttctccaggtggtaattcccctatctttggggcagcacccaatactctttccatgtcaaaccgcacttcaatattgcgcatgctgtagccaacaatcatcaaccaaaacatcaagttggctagctgattagcacttgtttctgaaactgttgtctgcactcaaaacaaaacaaaacaaagtgactaactttaaggtgcagtaacattccaaacttggggaacaatttataaaatgctgcgatttcctatcagaaaatactaaatggaatggaagcaaacctgaatgagtggcacaattcaacaaaatggaggtatgcatggttctgaacaaaatcaattaacatgaacacagaaagaagtaaataaacactcaccttcatctgtgcaggatctgagacagccaaaaggcgctttatgaatgcattcatagcaaaaacgacatcctcgccggcactacttgccagctcctacaatgtttcagaatagtagatgaattatcacgcatgtaaaccaaccaaaaagattgatcatcctaacataaagtcagtattaactatatatattctgattcttaggatggatgcagcagagggtaatgggatcaagatataccttcagattttgaggttctagagtttttagatattccaagagttcattacttccttgagatgattttctagcaacttgatggctgagttcatcaatttctgcttcaagcaattctatatattttactgcatcaattttctcaggaccagtagtcttgttccatcggataacttctccagtaacctttttctgggttccaggagcataatctgcagaatcctacaaatgccagcatgcatattaaacaacctcatctttgctttttttatagtatttactatttgtgcgaagtagggaagctacaccacattgtaatgtactgttaagaacacttgcagaaaaatgatcaaaacaccaggagcacaaaatgttgaccgacttcattctgaaagctatgacattaaagtaaacaaatctaaatacacaagtcaataacctctagcactaatctctttacaatgtcaaacagcaatgagcaaatatgacaatgcaaagtactggttagaaaacaataccaaatgtggctgaccagtgacacaagccagtgaattatatggcacactgaggtgccctggcaggagagagacgtgagacattttacaattagtgttagtgacaacatttatgttatgcatggatgtgtgctcctcaatcaatctaacatccaaaatgaatattgcatctttcatcgctcctactcaaagcctaattaaacactaggatgccaaaacagtagctggaaaccaccaatagttacaatagctgagttggttttcttatagaaagacaaattttagttttccatgttagataacgctgtgaactcctgaggtaatgatcactcatcaacaagctttcctatgaaaaaaataactcttcaaccaatagaaacactctaaagatcagattaatttcagtcctctttactttgaatccgggaagcatcattgctacatacttatcaagttatcattgattgatgcttcctaaccttactttctagggatacactacttggacctctctttatggaggtttaaaccatgcacagcaacagcgagtaaatgctgccatgcaaaataagacaaaataaaatatttgcagttttaataatgtaaagttactaccagcaaaaacttgactttatccactcatagatttggttgtgtgaattaatgtaagttgcacatagtgttaacctttcaaaagacaaacaaatgatcaaaaaatgagttttcataatcaactctagattactaagcagatatatacatgtcaacatggcaacaatttaatcatatgtccctgtaaggaatatatgtccacaactcagcattggtggaaaagtacattttcttcttttggttctggaagggcaatctgctccaaactctgttgcaattccagacgatactgcgcattcctgaacatgtatccggtcatcagaacactgtacataagctgagctagattttcagcaacctgtgtcgatgaaaaaggtaaataaacatgtcacaatttcatggctcaagtgtacaaatgaattgtgctaataattagtagtatgacataatgccatacaagaaaaaccggcgtcaagacctgaacatatgatatcccattaccgttgtcacagttacagcgaaaaattgaggtggcagagtcccaatcatattagtcaccgtttggcgcatggcatcaacaaccttttcagaaaaaaaaatggacagagggaaatgtcatcatatcaaagtatttcaagaaatcatcagcataccaccctatatatctagggttggaagtgggtcaatacataagtacccattgcctctagttcaaccaaatcatctaaaaatgaactttgatgttgtgttttagttcatctggttgaactatagtgggtcaattggtacccatggattgacccagtcccatccttatgaattatccaaaacacagtttgtggaaacttaggagggaagtaagatgataaaaacctgtggcggagctctttttatgaagagctccataaactctggctggacatttttaacgtattccaggagtatgtccctccggttctttggctgtaagaatgaaaaaaacacatagccatagctttaaaatatggattgttgtcagaatattatagccatagctttaaaatatggattgttgtcagaataatattatagctaaattagcaagaagatattagtatagcttattttcgttggtgccaaacatgataatagacaatggattaattgagaaccaaagacatgtggacgaaagggtgttcatgcatatatttccatcgatacaactacaaacagagtctagtccaactagcatgatggttctgcttctaatgaactcctgcatggcagcttgacactcaaaaaaacaggtcacagaagtacagaacagtattttgacttttgagaatctctgtgcacactctgcagggatgaaaaggaaactactctacagcaatggatgtagaagtagaggtgctagaactttctgctctgagcgataagtctatcaaagattgtcaagagatccttgctaattttcttgaatataaggttctgccagaactttctgccctgagctataaggctatcaacaattgtcaagcaatccttgctaattttcttacatataggaccttcaagttgttttgtgtaggaacagatcaacaaaggcaagatatcataaaagccctcaactcaacatgttttgtggagagtgaacaatccattgactaccagctgccctagcaacagacaacagtcgctcgtgcagtattagacagatcattgatgccatggatcagtgagagttaacaatatttcatcaacttatatattattaacaagcggcccactaatggagaaaaaatgtgagcatgatgagtcatacatatgatatatctattcattgcacagtgtaattcagatgaaaccgactgatagaattgcagttggtggtgtatcatttatatatgtatatatacatggtgtcttggtataggatcaacctccatgtcctgttaccattcccaaatgttctgcaagataatctcaatgttttgtaagcctgatttgtttagttcatctgcctatagttcagatctcagggtaattaaattaaattgcctcatcatgtgacctatgcagtgcttgactacttgtgtcttattctggatctcataatgtataaaatgctcaggacatcataactatctctgcttctccgacatattctcaggtagtcgacttggagttgagggctagtgcgaattatttttgtgcaaaccattacaagtttatgtggagaacgcataccatgtgattgatgcaaaattaacacaagaaacttctccaaattatgcggtgcatgttatttgttagtaaattgaaattatctctcctgttctatcatggcatgcatccaaccagcctgtgagaatgcagacggtagcaggcaggcgaaagaaaaggagtaaccaatccatctatctatccattaagacagagaaggaacagtaattggggagaacaggagagggattagggaacagtagtagtaagtcaaggggattaagatttaagagagagggaagggttggttgtttaccgtaccaatttggtgtcggcaccattggctgccttgccctctccgtccccaccagatccagatccaggggcagcgccgttgggcccctgcgaatcggcggctgcgcgcgcgaggcggaggccgacgaagcggctgcagcgcgaggggaaagagacgagcagttgtgatgctcgacgggtttgcggccgtggcgccggcgagtgggtacccctagaggtaagcaagagggagggagacatggcgtggcgatcgccgcggcggcggcggcggcggcggcggcgacggcggcgaggctttgcccttgtgcttttgctgctgcgccccgcaaatgtggataacaaacaccggcagcgttcagatccacggtgtctgtgtccctcttcaacggccacgatctgtctcgttttcggggtccttttaatctcaaggcctcacattatctcctatttcaactttttttttaactagcaatgatgcccgtgcgttgcaacgggtgaagataattttaatcatgtatattggtgagaaaaaatataaaggaatcataatcataatcataataaaatataaaattgcagtgacctttgttaaaaagataaaaatatataattaattttctgttaattccattagctaaaaataatataatatgaagtaggaaaagttattctcaaattttagcaattttcaaaaagcttaaatagagcaaactaattatgtaaataaaaacaaatttaatcacccaaataaaacaattagacctgtaattgacaatatgttgccagctcgtttaaacatgagcctgcgggtgcgtgcggcatatatctctcactcgtactcgtatgtcatggtcccttttttttacatagaaaaaaatatccgtgcgttgcaacgtgtaaattaaaattataacaaatataaaaatattacatgattaagatttagttttacatgatatgagctctttaagaaaatatattcataataaaataaaaaaagtccagctgaagggacttaaagtgaccttattccatacaaagcgtacacgtggtccatgagatggcccaatagtgtgggcggcctaggaatagaatcgggaagaaaaacttaagctacctaaagtgaacttattccgtgtgggcggcctgggattggcgttcggtgtgacgcgggagaagccggaaccgtctgatctgatagacggtcctgattgacctcgacctatataaaagttcaacagcccaaaccctaaccctaaaatcatttcccctccccccgctctctatctctcaaaacaacgtggctgcgccctggcataccgacatccctgcgacggcggtggcggttcggcaacgacaacgaaaccctccccttccggcatcggcgttttcttagtgttcttgaatctgatcttgtattcttgtattcttgtagcagtgttttctctatgatttatgtccaaatttgatgcggtctctcattatttttttctttcttttcttttttttgccaccggagaggggttgaaatgggatcgatcgcacgtgcgatggaaatatttttttcgacgaacgaaaactataacccggaagccatacaaattttttagttaggtatatatagatagattgaattggacttctctttttttttcatttttttctccctttttttgttttttttaccgcgtcacgtataatcggattcgattttttttcgctcaatttctttttcacgctttttttcacggacggacgacggaaacacatttagttttttaagaagcagagaagagatagagtcagagatagagaaacggaaaaccttttttcccaactttctttttttgaatcggacagaaaaaatggtcacgcttgttttttttggggggatggacgacgggattttttttaatcggacataaatctttttttgcactattatttttctttttttacggtagacggaaacccttttatagcacttttttttatcggacataacaaaattttcgcacttttttcgcgcttgatttttttccataaagaaatctcttttcttttttttacggaatttccaagggagtcggaagttttttttaatgggagtcggacttctttttttggtttttttctcatcgtttctttttgttttcacggacgacgaaaacaggttttactttttaagtatatataagtatatataatatatagtagatagtagacttagaaaagtacccgtgattgcaacaattaaagacgacagggaaattaagtattatgtttctctaatcctattttaatgaaaaagttgaaggaatccctttaataacatttcatgaaacgaacaacgtaaaggtaacgaaagttttcaatgaaaaaaaatttcctatccttcccatgagttagagggtttcataggtaaaattcattaggacccttgatatcttatttctgcatagtcgattacaactgtgtatcttaacttgagcaccagtaaacctacagtcacgtacacaattatgttggctatagtgaatcctagattgggttgacgaaagggatggaagctaggaatgcaatttaaggggattaagcaaaacggtatatttacaaataaaaagtaatttatcaataaaacttttagatacgtgttattagcgttctaaaagtaaagactgaaaaataaaattcaaaaaaaccccctcaaatttagcttcaaatttaaagttgataattcaaattttaactgataaatataaggcaggctatatataggatagcccgctataggtaggtaggtaggtagcgtgctgatcgatcggtccggcgggccggcgacgagcatggcaggtgacggtgccaagtgctccgacgaggtgaacgacggcacctacttcatggccggcgtgatggccgtgaccggcctcatggcgaccgtcctggcgctctccggcatcttccattgcgcgcttcgacgcgttgggcagccaagcataatctcgcacatcctggtatatatatatatatatgcatgcggattggattggattgataattaaatttccagcagagagagagagagagatcgagatggaagctatatatatatatatatatatatatatatgagattgcgagcatggcagtgcaggccggcgtggtggtcgggccgacggtgctcggccgcgccgtggacctgcgtcctctgggcatgcaggacgccggcagcgcgctcagcgacaccatctacttcgtccgcatcatcttcatgttcttcatcggcctggagatggacctccggtacctccgccaccacctgcgccgctccctcgccatcgcctgcggcggctcggggctctgcctcctgctcgccgccctcgcggggcccttcttctacggcctcctccaccccggccagggccccttcaagcccgagaagctctacgcctccaccgcgctcttcatgctcgtcctcaccaccaccgcctccccggtcctcatccgcatcgtcaccgagctcaagctcaccggctccgaggccggccagctcgccatcggcgccgccttcgccaacgacatggctagcctctccgtcttcagcatcatggtcgtcggcaccaccgcctacggccccgacggccagcccaccccatccttcccggacatgtccatcgtcatgtccatggccttcacggcgtgcctggcggtgctcgcggccgccagggccgccaggctgctcaacaggctcaagcgcggccgccgctacgtcagcaagtacgagctctgcgccatgctcctgctcatcatcgccctctcgctgctcgagcaggtgttcggctacagcgcctccatgaccgccttcctcatcggcctcgccatgccgcgcgacgggcccacggcgcgcacgctcgtcgaccgcctcacctatcccgtgcaccagctcgtcatgccgctctgcttcggggccatcggcgcaaggctcgacttcgccgccgtcggcagcttcacagccatgcagttcgccgtcgccgtcgccttcacgacgctgctcggcgcagtcgggaaggtgggcggcacggtgctcgcgggccgcatgctgggcatctcggcgagggagtcgctggtgctgggcttcctgctcaacgtcaagggctactgtgacatcctcgccatcaacttcggcaaccaggccggcatctggggccagacggcgcaggtggtgctgctcctctcctccatcctcaacaccttcatggcaggcccggctgccgcggccatcgtccgacagcagcgcgccgcctcccgataccggtcgcgctgccttcaggacctcaaggtcgaccacgagctccgcgtgctggtctgcgtccacggcgccgggggcgtccacaccatgctgacgctcgcggagctttccaagggcaccgcgccgctggccgtctacctcctccacctggtggagcttatggccgcgcgcaagtacgccatcacccatctgtaccatgacgccgacgccgacgacgacgagtggggttatgcccgcgagatcgagcaggtggccgcggcggtgaacaccttcacctacgacgccggcgtgccggtgcggcagatgaccgccatctccagcctggggtccatggacgcagacgtgcgcaacggcgtggaggactcgcgcgcgtcgctggtgatcgtgcccttccacaaggagcagcggtacgacgggcgcatggtgtgccggcgagaggggaggcggcagctgaaccagcggatcctgcagcgcttgccctgcactgtcggggtcctggtggaacggcgcctcggcgggggcggcgacaagggcgcggaagacgtggtgaagaaccaggtggtggcggtgttcctgggcgggccggacgacagggaggcggtagcgtacgcgacgcggctggcggcgcacccgtgggtgagcgtgacggtggtgagattccttccagcgcgacaggatgatattaccattggcattgatgaacaattattagccaccaccaagagccatggcggtgagggcgccatggaggtggcggtggaggacgaggaggcgatggcggatgaggagttcatggcggacgtgtacgcgaggctggtgttggcgggacaggtggagtacacggagaggtacgtgagcaacggcgcggagatggtgaattcgttgagcgccatggtggggacgtactcgctgttcgtggtggggaagggcggcggcggctcggcggcggcggccatgacgagcggcatgggagggctactggaggacgagtgtccggagctgggccccgtcggggaggtgctggcctccgacgacttcacggcctgcggctccgtgctggtgcttcagcagcacagcgcgcatgtgcatcgcaggatgaggaggtggaatcccaacattcacatcaccaccacaccctcgtcgtccgatcatcatagccacccaccctagctatatactacttcatctccgacgacaacatcatccatggcgccatgcatagaacaaattaattaagaggagtacgtgtggcacgcaatggctagctggttggactggatcgacctagctagaacggggccgggttgacattgcaccgatcgatcgatcgatgatctgcatctaattgccatgggaaattcagttggttttagggtaaaaatcatatgcacccgtgtcacgcatatacgccatgaccccatgtgtggggatagatgagtgagtatatgtaccgatcgaaataaacagactcgattttgaggttggaatgttttttttaataaagtacgtgggcagtctgtgttatccatgtctcccaactcacgaaatagtagtatatctttagcgtccctaaacggctaaacttatcttggatgccatcgctgattcaaaccgaccctgatccgccccctgcatcaacctggcatgctatatatggtggatccccatcagacttggtcctgacatacaagtcccatgaaaagaatgggacgattatttttcgtctacggatatctaaattttaaccctgatctgcggcgtgtcatggtggatccccatttgatttgatcatgacatgcgagtcccatgcaagggtagggcccacatattggtctttgttgctcgagaaggttagatggcgcgtgagctagctaaaagaggctgacagcataggcaagaatcctaattcgcacacacgggcgagcgaggaagtggcacccgttttccgaccgtgtcacaacaagccatgcgtgaggggggttagggttagggtgaggtggggtaaaggagagggtggtattggggagggagaagtgggggatcgggtctagagggatggcttgggagacggcggaccggcggtgggtggcgaacaagggtgggcgatgaggcggcggcggcgccacggagccgcaaggtcagtagcgggcagtgggctgatcatggtggcggaggcaaagcgaggtgaaggggagggggaggaggccggccaggtacggtcgccctggtctgttgactccttttggcgccggcgaggccgggggcagcgggacagtggggtagggtggtggagactgaagaaagagctaacctggccgaagggaggaggaaggggactcgctgaaggggcgttgttggtaggtcttgatagcatcgtagcccgctccactcttgtgttgtccctaacggagtaagaaataagggtttgctagagggaggaggaggggttcgcccgatgcaaggaacttggccgttggtatcgtcaccactccatccacaaactgccatcgaggggccgaggaaaagatataaatgagagagaaaatagaggggtggagacagataagggtggggggagcccctgcgcacgacttgcctcccggcacgagctcgcgagataggaagcccctagcatatgagctggaagaggctgctatcttctcaccagcgtgcctcgccaccaccattgtttccttgtcacaccagaggtgagagagaagtaaaggtaggcacattttcgtccatgcaagaggcatatggtattttagtacataacactgtttgagaattgcattttagtgaatcccatttataagatggtgttttatcaaagcgcacttttaacgatggcataatctcacagcttcataaaagacggttaaaattttcaacgtgtatttatactgtgaattccataatcttaactacaagtttgttatatttgcagtaataattttaaattatactaatataaatctcaaatcctacattgtagttttctcatatggtcaagaaaatcacattttttaagcaaagacacaaaaaagatagcacgcggagaatcaaactgcacggattattctgaccgcaaacctcccaatccgaaaagcatggcaaactaatcgcaaatcagcctgttaaatcaccatctaaaaaacgattaaagaaaaatgtggcaccatactacctccgttttttaataaataacgccgttaactttttctcacatgtttaaccattcgtcttattcaaaaaatttacgtaattacaatttattttgttatgagttgttttatcactcatagtactttaagtgtgatttatatcttatacatttgcataaaattttttgataagacgaatggtcaaacatgtgagaaaaaagtcaacggcgtcatctattaaaaaacagagggagtatatcggaaagacggcgctgtccccctctcgccacgtggtttcctttttcatcaccatattattttcctattttaataaatttatacacctaaagtttgtacacctcaaatttacacatataaagtttagaaacccaaaatttaggtaatttatacacctaaagtttgtacacctcaaatttacacatataagttaaaagtttatatatctgatttaaatttgaatttgaattcaaatattctttatatatagtatttctatgcataaatttttctcaacttttttaaaatttttatggtatactatagcagaaagagaaagaggggaggaggaagggagagatccgtgcgtataaggggcaggggcatgtagccacacccgtcatatatatatgtatagcaaaactgttcttctccacatgacatcatatataatcttcctcccagaagcagcgcaccgttattgagcaacatgttgctacaccctttctccaccgtacttctcccgtcccaaaacgtccaaaaaaaaaacaaacgtatgtataatgaatgacgaatctagacagactcctatctatattcattgtacgtaagagttgagatcaatgaaaccgacgatgatgcgcagataatttattttttatgaaaaaaacacttacgatctattcttaactacttcatagaaagaagggatatgcacgaacacgaaggcaaggcatgcgttggatggatggccaaacacatgatcaccgcgtacccaagaaagtgatcagtaattcattggtgaagtgcatgcaaaactgaatttataggcaacacacaagtgcaggcgtgcatgaaactatactcattacatcccataaaaagtcaacctagtaccggatgtgatatattctaatactacgaatctgaacatacatatgttcagattcatagtactagaatatgccacattcggttatagattcgtttttttatggaacggatggagcaattgatagcagctaatccgagtctcatacaatttatattaatttgggtcttgcagcaagcaagcaaacaagggtatgcaaaagttagccggtgacacaaacaattaagcatgcatgtatgcatccatgtgtagcggatgatcgacacagtaacaaaatagagtacttacgtactaccggaatgcatggaaagccaagccggcggatcagagtgagttgttgttacttgctagagactcttgctggagctggacagccaacccaattaaataatggtccccaatccaatggctgcccgctaccttgcctatgcttaattaattaaaggcttaagctgctgcgttctgatcaagtggatgagcttcttcggtgggaactctgcttgttggtaggctgctggatcagagcagccatctccgtcttaagctgcataggatatagtgcattattattacaatatacctgtagtaaaatcaaaggattctatgcacatacatatatatacataaaagatggattggaaatgtagagtgatgaatcgacttattagtaataaaagtattagggaagggaatacgaagttaacttgtttgcagtgcctcttgagcttgagattctcattcaccagccggcgaacttccttctccagctcctgcacatacgcctatacatccatccgcgcacataattaagctcatgcaattagctaactagtactagtgtggaaccaaatactactccatctatccatccgagagattaattaatagagtagctagtactatactagatagtatgaggaaatggattagaggttcttaccctcttccttgccctggagcgcagcgccgactccctgttcttcatcatccggatggtcttgcgctcctcctcttcctcgtcgccgccgccgccaccgccaccgcctatgcccacctgcagcagcagatccagctcctcggcgccgcccacgccgagggatagatggggagcaccatcggcggcgctggtaccggcgctggagatggaaaggaaggagctgcagctgctcaggcttagctgcgggctgcccacgccgcccagctgctccgccatgcctaacctattattgtgcctctcttttctttttcttcttttagctaagctaaagctagtgtgtgagtctagtagactctaagattattcctcctcctcctcctcctcctcctcctttggtactccaacgcaacagcagcagcagtagtagttattccggttggcttgctggatggatgacgatggtgccaataataaggtggactttacgtactggagcagtacttacctgccttatcgattcggaggcttcctcaccaagtataataataggctataagtcaactataaatttacgtggaggaaaaagaatttaaaaaactgagagggttgttggctcttatacaagagctagctattcacatactttaagataaatacataaaatgcatatgtgagagatagagagaggaggagaaaaaaggagataaccttatagctcatttactgtacatgttaactctaatataaactataagccaacttgctcttaaaacaaacaaatatcttcgtacatatttatattatatactagatttatttattttaaaattaagagtaagcaaacaataacgctacgttttcgttaacaccagcatctgctcgtctttttatttatacttattcttatcagttaaaatttaaatttttaacattaaatttaaagctgattttagggttttttcatcgtagtttatttttcaccctttccttttagatagttaagaatacgtatataaaagttttattcacgaattatttttcatttgtaaatatagcgtttcgcttttttttctctaatataccaaacgatggggctgcacgctttctaaatggtacaatttttaacaaaaaattgtatgctcgattaatctacgctaatagcttgtattgttttacgtgttgctaatatgccaaatcaaaactcaccttacgaccccaaatcttcacttagggtgtgtattgcgaggaggggttgggaagctctcctttatacacacggaaaacggggtggctcaatagtacatgattaattgaatattaacttacaaaatccttgaaaaatagattgatattatttttacaacaactttcatatatatatatttttaacaaatacaccgtttaacagtttaaaaacagatgcgcggaaaaacgagagagagtagaagatgtgaacctaacttccaaacgcacccttgctattcatgtcaaaaaactagtgccttcttttgatgtgcacttgggcctcactagcaaagatagagatgtcaatggagccctattccacgttttcgcaagggaaaattttccattcgtatagggatggttaagttgattcttcatgaaaaatcaaatgggggaacaacagaacaagtccccatctcaggtctggtgggacacaagtgatccttcgtccccgttcactatatatgtagacctaagtaaaactaatcaatataattttgcatgtctaaggtgatgattagtggatgaatggtaatattgtattcttttcatcaggaaaggatccaagattactttgagggagctcattttcttcttgctcctctagctaaccccctacttgtcttcctctcccctcctgcatggggatccaacggggaaggagggcttgacccccttccggtacccacctttggattcacccctgccggccatgtggactaatagatatatgctagtatatattgatataaagtgttgatgttatttattgattatatgtatgatctgtggtcaaaacaaaaaaaatcacaaaaaacaaacatcaaatatttggtcgacaaataaaaaagcaactcaatagatcaatagatagatgaagcatctcagaatttgcacacgcgactagcaaattaaaaagattcagagagaaaaaaaatgaaaaggcaaatcaagcttcatgattggatcccgtcgatctccaccagatgcaatcctgccatctcctgttgtccctattcctgctgacaccgagacctgccatatggagacggaggcggccggcgggatggaggcgccgaggcggaggcgcgctggctggagatgaaggtggtgcgatggcggcatcaaggcggaggtgggctcgatgtcgttggaggcggcggcgaggtggaggcaggctggctggagggcggaggtggcgcagcggcgcgatggaggtggagggtggaggcagcgccggtgtgatggaggcggaggcgacgtgaccgcgggtccacgctgcgtgagctcgagcgcgatggatgggcgaggcggcgacgcggcgttgtggcctgtgggagacagggagagtgcggttcctctgtggctgagtgcctctagggtttggtttacttggcctattgagcttcggtcaaccgaggctaatgactgaattgcccgaataaatttcggtctttcaatagctaagaccgaactactaaccgactttctcggtctcggtcttattctgtccacccctatctacaggttgtcaccgttgaactgtgaacatgtcataagagggacacttccggccaacccaattggtattccagatactcttgattgacgatctgctaaaatctacgccaaaaggaacaaggagttaagacttagattgcacgtaccatggatcagaggtgtgggctataagaacgctgaatccatgtcgtactccttcttcatgactgccatggcagacgccttgtctccctgatcctaacaaagcatgttgccctctaggtgttcgaccttggtactcaaagccccccaacacataacttcccacctacttctccacttgaggaagcctcactttgaccgccttcttgagttcatggaagtcaacttgagacttctcttccaccctcttgatatccaggaagtgggctcaagatctctcctctgcctccacccttttcttctcattctccccagttgttttcaggagcagatcgaacttgctatccagactcaaatcctgcgtcatcatcgcttccttgtgagatgcagatgacgaatcaaggcctgaatccctcattccggactcagtcaactagatcaaggcaatttgccttttcgcggaatatactcgaaagagcatatctccaatccttgatcatgaattttacaaccgagccaagagtgtttccacactgacgagctctgattctagattgttagaaatctcttgggactcgctcaattaactggaagagtagatgaatatgcatacaactttctctcgatccaataggatcgagccactgccaccaatgcctccgcgtaattctagtctgtgttctatcctttttaaccttttacggttttatccttgtactacggacgcatcctctctctcgcgcgcgtgtctggcatgcttaaggcctagtcacttggcccattcaggccggcccgtggactcggggatttggaaccatatctcgtagcccacgtcggtctattggttgagacgctgtcttgatgcctcccttgtgttgtagtccatccatttcttcttctctagtttcttcctatcgccgcgcttcttcttgtcgcgtgcacgtgcttccttgatcactgcaccatcttggctatcagcaggttccatggcgccgtcttgatcagcagtatcgccatttgttcatcttgcgcgccatctccagtcatggtgtgtgtcaggcttctggtggttacaggagccggtcacttggagaaataatcgttgattggagtactgctgtatatggctggaagaaattatctaatatttagtttgggcatgcttggacatttgggaatttctttcataccattatcttttccttttttccccttctttcataccatttgggaatttgtatatagaaacccggaagatggattttgggtacgttgccttgctgagatttgtctctccaattaacatctagctagtctgtcgacgtttgatgtcgcaattctggtatttgcatggtatggggatcatcggtgctaggatatacgcgagactgaggtaaaagagacggagacagggatttttatacaggttcaggcccctgagttgtcaggtaataaccctacatcctgttggccagagccggagttgctttttattcaccataatcacaccagtacaatatgtggggtagcctatctaactgttgtcgacatggtggtctgacggtctgacttgtagttgacaacaaggtagccttcctcctcgaatacgtgtctggcgagatcagagatagcgctttcgtctctcctgacggtatccggagacaccgtaggggaatagccatgcctatccctgaagtcgatatccggcggcgtgtcttggcgtatgttggcttgtatgttgtctcgtgtattgtgttggttgttgattgtggtgggtctcgatcatgttgatcgtgtcgaccgtgttgatcgtgtcgatcgtctgtcgattgtcttgtctcccctctcctcctagggggtcttgtatttatacctataggtgtccccttgtccaagtagaactagggaaaccaatatggatacaatccgagtagtcctggtcgtttccatgtagaactctggttgtctttctttatccggaactccctccatatccgtaggttgtttctgtataggacatggtatgtggtgggtcctgccgagatgtagtcgactactattaggtatgtggtatccataaccctgacagtagcccccgacttcaatgcaaatgaacgtatttatattctcaaccgcagaccctggagtaactgttatcgagctcatgtgaccgttctcggtgagttcagagataacgtttagacttcctttgtcagcctcgtgcgggcacctaaagggtttgtctgagtcaatatccgatgtcaaccaaggaagtacatagcgtacgactaagtcttccgtcttgctgtaatcgagaatttgaattgaagtcaagaaattttatctcggcaggtacaccatctcttcattccgtattccttgtcgagatccagcaaccgttctcgaacgatcgagaaggcgtagagtctgcgacggagccttgtcaacatttgtcgtactcgccttagtcgatcttggtatagaaccatagagacatggagtcttccataatgtcgaatagaattttcctgaaatcaatactcagaaaagaatatcaaatagaaatagcccccgagcgaacgctcaaaggatgacatgttataatatgtatggaaaattgaaaatgaattaaatttaccaaccaatgttttgtgtacgagcgtcttctctcttaccgacttcgatcagtcagtttgtagagtcatacactctccctagcccccagccttgtcatcagagaatcgttctcggaggagaaggctcttggacccttgacctgccttggttgaacaagcactgatcctagcccccagccgtgaagttggaaaagtcaatttccgattacatggcttggttaatacgcacggcgagaactcttatacgacaagatcttacatggtcttttgtctctacaggatccgacaaagccttatcggctctgggcgtccccagccgaagttcccttaggttcctcggaggccttgtcaagacggcgtaaagggacagtaagataggtttcaacgctaggtgtcgtcgtggtaagggatctctaggtaaaacacttggcgatactgtgtacctgctgtcaactttgttgaaatagaggtagtaggagagttgctacaccgctggtggagaaccaggtagtagtcgtaactcgaccactagaagtggaaaaagtgggagaaacgctgcatcgctggtcgaggactaggcagtagtcgtaactcaactacttaaagtggaagtagtgggagaaacgctacatcgctggtcgaggactaggcagtagtcgtaactcgaccacttaaagtgggagtagtgggagaaacgctacatcgctggtcgaggaccaggcagtagtcataactcgaccacttaaagtgagagtagtgggagaaacgctacatcgctggtcgaggactaggcagtagtcgtaactcgaccacttaaagtgagagtagtgggagaaacgctacatcgctggtggaggaccaggcagtagtcgtaactcgacgacttaaagtgggagtagtgggagaaacgctacaccgctggtcgagaaccaggtagtagtcgtaactcgaccacttgaagtgaggcaagagagatcactacgttttactggttcgagaactaggagtaggagtctcttaatcacctataggggcgctaaagttggtttgttacatgtgcacatcatgtggccagcatgaatcacacacccaacttgtagcatatccggatgtccgttcgcaatcatgtcgggtgatcaagccgacggcgttcgcgaggaattgtccgttaacaaccttttctcgagtagtccagccatggctggtgctatgagataggtcgtcggtcttcgttggcaggttgtgtgcgataactccgcatttgtcgagaatgttctcgataatggagtgtactcgacgacaacctactcgtgtgctcaattgttcctaaaaaatattttctagaagacaaaatatatagcagataatatcgagtatgtactcaaaaaactgcatggatcttctagtattatcaggatataacgagtagatgtaaatatcaggtattatataaaccgtaaacaagcatgatttatacagaagaaaaacagagcgagcccccagcgttagaccgtagttggttaacgtcggaaacactcgcgcgatagatattgtataagaaacatcctctaggtaaacataataaagtatagacctgacaatactgtatagatctgaataggtacgataaattgtatataaaatattgcgtacctttgtagatatatgccggatatatctacgaaattagtagatcaatttgaaaaaccaatctaccaattaccttattgcgtactccttcgacatcatatgatctgacatcttttggtacgccgcgtatcttgaggcttgggtgatctcgatagaccaagttgtcgatgacgatgatggttccgatctcgtcggaagacatgttccggtcgggttagatctccacagccgaagtcgtcgagtagcttgttattggagaatccatctcttaaacccatctcgtcgaaaccctgaagcaccaaagtcccctacctggcgcgccactgtcgacgtttgatgtcgtaattctggtatttgcatagtatgaggatcgtcagtgctaggatatacgcgagactgaggtaaaagaaacggagacagggatttttatacaggtttgggcccctgagttgttaggtaataaccctatatcctattggccggagccggaggttctttttattcaccataatcacaccagtacaatatgtggggtagcctatctaactgttatcgacatgacagtctaaaggtctgactcgtagttgacaacatggtagccttcctcctcgaatccgtgtccggcgagatcagagatagcactgtcgaaacaagatttcggcaataataaaagggggtggctatcaagctaggaaagtggatgggtttggagacaaggaattttatacaagttcaggccttcttattcaagaagtaataccctactcctgtccggggatgattccgccgagtgtgttattgattgtatgattgggagaaaagaaatcgtgccccaagaggcacacggaccctccttatataggggaagggatccgtaatacaaagtacaatccatatcctaacggaatatggaattacagataaaatacaatcgtaaccgactaggatcccgggtattttcttaacatacaagtttagaatctaacccgagtcctcataaagatattctatctatatttggtaccatatatccagctggaatataaccgccatgtagatatggggtaaccataatctccacagtagcccccgtgaccttcgcagttgaccaaaatagtctgctcgaaacaaataatccgagtgcttcaattcaacttgctccggcttgccgagtgctaaaagactgtgaagggcgaaaataaaacatggtgcatcgagtagatgcacctaattaggtgtagcccccgactatgtgattagttgaaaaactaaacatatagtcaagaaccgagtggttttatagcggagcacgcatggtacttagtaagatacccagccgactgcctctcaacttgaatataccaaggacaaaaaaatacaagaagggccgagtgataaacactcaaaaggtccaaaaatagatatatttggtaggaatccgagtaagaaactcttaaaatgatcccccaaatatgataaagatcatggtaattaagaagtttattagcctaggctataacccttaccataatcaaaataagcatataacatgctaggagaatgactactaataaaccagtcatctcaaattaacccaacagctcttgtagcctaaaaaagcttacaaaaatggtataacacctttctgtcgggcaccttttcatgtgcatcataataattccaaagaattattgaatcgtgttaaaaaggattttaacagcatcgggccgtgtcattgtgagcacatattgccaaagcaaaaagcgcctaagtccctagggatcacaacgggccacgctgaaaacataattgggctgaagtactgtacaggcctaggcccattagtactcccgataccctaaaaataccgaagtccaaacgtcgcttcgtcttccccgccgagactctcgccattccacactccgtgctacagtatagaaccatgccgacgaagctagggttcatcaatctgctccaaaccatcctcaaaaacttcacgaaatttctccccgtgtccaccgctccgattccccattcctctccagccatatctcggaccaaattaaaccatccagttcacattcatggcggaagaaagagaaagcttcgagagttagtgggcgccctccgatgtgacagaagataacctgaaggagatggtggcgcacggcgttcttccagcgaaggagattatcgggtggcgcccggcgttcggcgaagcattcccgacccccgacacacatgaaatcgtggtatttgctcatttcttctatggcggattttctcttccaacctctagattcttccgggggattctgaacttctacgggattagcttgcatcacttgaacccaaactccatagtgcatattgccaattttatccacgcctgcgaagcttttttgggcattaggcctcatttcaccttgttccgccgcatctttttcctcaagccccagccaaataagagcaaaccatgcgtagttgggtgtgctggtttccagctcaggggaacactgagccaaaaatacttctccatgcccttcaagacctcaaacaaaggctggcatgcaaactggttctatgttcagaatcctgagcctgcactccccgagtactgctgtcttcctctagtttaccaggacacatggaactcattgcctatgggagatgaagctgctcaggcagtggaattgatggaacgcatgctaaaactgaaggaccaaggcttgcaaggagaacagatcactcgggacttcatcaaaagtcgactagctccaatcaaagagagatcccgcacagcttttgagtttgatggcaagcatgatccaaatcgggaagatccagattctcttgactttaaggtcatgaaagaaagaatgtacaagatcttctcaaacgctattgttgtcagctattcacatctgctgcccgttgtgccattcaatgcattcaaccctcctccaccggtatgcactcaaacatctcaatcttcctcaaaagtatgcttttgttttcttgttgaatcagttaacaatggaggatattacacctaggaatttgctttgatgaagtcggatcccccaatcgctcaacgccgatctccccgccaccaaactacgcaagggagcggaggaccaagaattcggtctgaaactcaaccaagtgcttttgatccaatcggccagtcagattctcgaaagaggaaactggttataagcgacgacaaagcagatgatgccaccaggaggcctgaagaccgagagacgaccaagaaactaccaaaacagactactccaaggaagaaaacatccagtcgctccgcgccaaagatcaggaagtcttccaggtgcaactcatataacgatccctcttgtattgatgcacacccattgcggcaataatgctgataatcaaatttgcaggaaaccatctgatatagacccgtctgggaaagactctgacccgactaacatggacacaagttcttccaaagaaaccggaccaactgctaaggatcatccgagtgacaatcagccagcaaccgacaatgtagaacccagcaacgagcccccgactgggaaccagccggccgaagctgaagtcggtgctggccaggagcccccgactggaaaccagtcggatgcaggggtaaacgaagagattccagaagtcgaaacccaagcagacaaccctcacggacaagacgccagcaatgaccggagatctagatctcctttaaaagcatccgagtccactcatcctcgtccagaaatcattacaggtaaaacactttgtttgagactatgtcgacccaaataactctgatcaatcgtctaacctctgtcagtggatacattagggccaatgatcagtgacgaagaagaaattccccgcatacaagcagctgaggattcacgccctccgattctggtcaagtggtgggatgacaacatgcagcctcaaggaatcgtaataaataagcaaaaagaggacgaggaggtatgcttgctgaaaaaggcactcagccaagccacccgcattgtaaatgtaagctctttggcgcctgatctcaaccatctcgtttgccatttaatctaggcgctaattaaactgtcttgcagaggattcatcttaggaacgaagctaaaacggcaaccttagagaggctagtccctcatctcgggaccctcgaagccaccaggagtctgctgcacgagacaaaagagcttgccagaaaaaatgagcatgatatgaggaatcgaattgctgagctctaggaatccaattttgaactaagtggctcatcaaaaggtttgcgcaaactctgcccaactgatttgtgctgttatctctgttatcctgattaaccgaagttaatgtagtgcaagctgccaagatatctcaactagagaagcagatccaaactctggaaaatgacaaggcagagctggcaagacagagagacctggctttaaaggaagttgaaggtatcaacaatcaatacctcaaaaagccattatcctccatatgctgacttattaatgtgaatctgttgatgcaaaccgcaagatcaaatctcaagctcaatttgatgtcctagttggcaagatcaaaaaacttgaaggagcccgggatgaggttgctaacgctgctgccccaattgttcaagcgatgttcttcaataacaacggcccgagtgcacttgatgcttttgaaattttcgacaagctgagagttgcttcggatacatatttcaagaacatcaaagaagctggaagtatgggagcaagtatggcgttggcgatgaccaaatccctttatccgagagttgacgttgatgccattgatggctttgcggacgggacgagcgaagaagctgctcttgacctcatcagtgatgcgcagaaagcggctgacaaaattgctgctgatgtagttgagagatttcaggacactgatcttcgaccgactggtcctgataattctgatgatgaaaagactaatactgattaatgtaccgataattttgatgattaatgatgatggaggcacaatttgtacaatactgatgaatttatgctgtgcttgatatcttaacttagctcctgatttcttaaaagtttttgtcaaaccttgttgagcctaaacctgcaaaagttgttaaaaaactttcagtcctcattaactaagccaagaaatcaaacagggcaatgatacatcaagtaagtaaattgaattgataaaaatcacactccattattattatagtagccccctgactgaaaacttcgaggaaaaacttgaagttagcagtcaaagaggaaagatacaaacgaaatgcctaagcgtaaaatcgacgaaggtgttcaatattccaagaattgttgatgatagtaccatcttcgcgcttgagtcgataagaacccggccgagtgacttcagcaattatgaacggtccttcccataagggagataatttatgccgatcctgtgttgtttgaattttcctcagaaccaggtcaccgactaaaaaggctcgtgatcgaacatttcaattatgataacgacgcaacccttgcaaatatcgagtcgattgaattaaagctgcttctcgggcttcttctagtcggttgatgtcgtctactcggccctcttcatggctctcctcgttgaagttccgaaatcgtagtgattcaaattccacttcacttagcaacattgcttctgcaccataaaccaaaaagaacggcgactggccggtagcccgactaggagtagtgcgtaaagaccaaagtacggacggcagctgatctacccacttgccagcatagggacgtagtcggtcaaaaactcgtgctttgatcccttgcagtatcatgccgttagcgcgctcaacttgttcgttactcatgggttgtgccacggaggcataacaaattttgatgccgaagtattcacaaaagtctttaaatgctccgccagtgaattgagtgccattatcagtgatgatccgattaggtaccccaaaccgatgcacaatattgatgaaaaaatctctagctttatctgctgtgatcgtgatgaccggtttagcctcaatccatttggagaatttgtcgatagccacaaagagatgcgtgtaaccgccaactgcccttttaaacgggccgaccatgtcaagcccccagaccgcgaacggccaggacaacgggatggtttgcaactcttgggctggcaaatgagtttgtctggcaaaaaattgacaaccttcgcatgtccgcacaatcttgtccgcatcggacacagctgtaggccagaaaaaaccttgccggtaagctttgccgacaatggtccgtgcagcagcatgattaccacaaataccagaatgtatatccttcaacaattgtctcccttcctccaaagatacgcagcgctgcagtattcctgatggacttttcttgtacagttcagcttcatgaataatgtaaagtctgctgcgtctggaaatccgctcggcttcatttttgtcttgagggagttcttgtttggttaaaaattttatgagaggttttctccagtcggcttcaatcacgcttacgccttgagtatccatggcttcaattgcttcttttatgggcacggttggttcataaagatgctcaacgaacacatcagaaggggctgcttcccgttttgaaccaaaattggccagtctgtcggctgcctcattgttatgtcgaaggacatgggtgagctcgagtccatcgaatttatcttccagcttgcgtacctcttgtcggtaagcggtcatattatcatctagacatgatcactctttcatgacttgattaacaaccaactgggagtctccacggacgattaatcggcgaatgcctaaagaaattgcaatccttaatccatggagtagcgcctcgtattccgccacgttatgggacgcagaaaaatgtatccacaatacgtagctcaatctttctccagtcggggaaattaagacgaccccagctctagtgcctgtaagcctcttcgacccatcaaaatgcatggtccaatattccatcttttcctctggcatgtcttcttggcactcggtccactcagcaaggaaatcagctaaagcttgtgacttgatcgaagttcgtggtttgaaagatatgtccaaagacatcaattctaaggcccacttcgcaatccgtccatttgcttcgcgattgtgaagtatatccccgagtggaaacgatgtgactaccgtgaccgggtgactttgaaaatagtgagataatttcctgacggtaattaagacaccatataataacttttgaacctgaggataccttgtcttggagtcggctaaaacctcgctgacaaaataaattggtcgttggactttttgaatatggccttcctcttcacgctcgacaaccaggaccgtactcacaacttgggaggtcgccgacacatacaacagtagcggctcttgtggatgtggcgaggccaaaactggtggagtggtgagagatttcttgaagtcttcgaaggctttttgtgcttcggatccccactggaaattgtcagttttctttagcagcttgaagaagggcatcccccgctcgccgagtcgtgagacgaaccggctgagcgccgccatgcaaccagtcagcttttggacgtctttttgggagtttggcggtttcatgttgaggatggcgttgattttctccgggttggcctgtatgcctctctgagatacgataaatccaagcaacttccctgacggtactccgaagatgcacttttccgggtttagtttcatcttgaaagctcgaatgcttgcaaaattttcttccaaatccgcaatcaggtcatccttctgcttggtcttgacgactacatcatccacatatgcttcgacattgcgaccgatctgagttgaaaaacacctttgaattatgcgttgataggttgctcctgcgttcttcaatccaaagggcatggtgatgtagtagtaggccccaaagggcgtaataaatgaggtcttcaagcagtcggattcttttagtcggatctaatgatatcccgagtaacagtccaagaagctgagtaactcgcagccggccgttgaatcaaccacctggtcaatacgaggtaacccaaaagggtctttgggacaagatttgttgaggtccgtataatcgacacacatgcgccattgccccgtctttttccgaaccaggactgggttagccagccagtcgggatgaaggacttccttaatgaagcctgctgctaatagcttggttaattcctccttaattgcatccttcatgtcctgtgcaaaacggcggagtcgttgcttgatgggtttggcgtcttccttaacatgtaaagagtgctcaatcacctctctggggataccaggcatatcggatggtttccacgcaaaaatatctttattattctgaagaaaggtgatgagcgcgctttcctatttacaatctaactcagcgcctattacagtagtcttgtcaggatcggagggatctaagggaatctttttcgtcttggcatcactttcttcggtctttgtcagcttggttgcaggcacttctccctcgcttgccgtggtcgcagccagtcggatctcttcgtgggcgagagtggtctcgtgggtttgagccatctcgcaactttctttgtcacatgtgacggcttgcttgatgtcgctccgtagtgatatgatccctcgaggaccaggcatcttcatcatcatgtaggtgtagtgcgggacggccatgaacttggctagagccggtcgtccgagtatagcatgatatgctgtctcgaaatcagcgacttcgaaacaaacattttctgtgcgaaaattctcccgagtgccgaaggtaactcgaagagtgatctggccgagtggtgtagctgacaatcctggaataacaccatggaagggtgtattactcggctttaattccgtgcgaggaatctgcatatcgtccagggtcttagcaaaaaggatgttgagagcgctgccaccatcgatgagagtccgtcggagcttgacattgcgaaccactgggtctagtaccagggggtaccgccccgggtggaccactcggtcgggatgatccgagcggtcgaacttaattgctgtctctgaccaccgaagatattggggcatgttaggctggaccgcattgatctcccgttctgttagcttctgttttctcttagactcataagccaggggtccgccgaagatgtggttaagttctttgcgatgatcttgaaaatcagtcggggcatcgttttcatcatctttcttctttgatgtgccctgatctccgtctgcaggtttccgtgcgtttttaacgtattgctctgcgaactgtttgtagatgaagcaatctttggccacgtggttggagttgggatgatgcggacattgggagttcattatcttgtcgaaggtgttgacgcggggatgttgtcgggaagatggagaggtggtcgccacaagttcttcgggcttacgcttgcgatccttgtggttgttacttccactcccccctgcggtcggcgtgtccttctttggcttccaagtggtgcccgactgtttggacgcggtgataacatcttcggctttggcatactcgttggctttttcgaacatctgcttaaccgtcctgggaggtttacgtccgaacttgccgactagatcctcgtggcgaatgcctttagtgaaggcggcgatgatgacgtcgtcggtgatgtcggagattttgttgcgttgttcggagaagcgtcggatgtaatctcgaagggattctccagacttctgaacgacgttgtagaggtcaaactgtgtgccggggcgttcaaaggtgccctggaagttggcgatgaagtgatcacgaagttccgctcatgatccgatcgtgccacggggtagtccgtggagccaggatcgggcggagtccgctagggccacatgtagatagtttgccatggccttgctgtctcctcctgctgcgcggattgcgagtccgtagacggtgagccaagactctggattagtggtgccgtcatacttctcgattctagtcggcttaaagccggctggccaatccactcgacgcaggtcactagtgaaggcagctactccatccacgtcgtcgtcgtagcgatttggtgaatggcggtgacctcgtgctgcacggtgctggttgatcgtgtcgcgaaggtcaacgggacgctggcgaggtggagagcgaggccgttcagctcggcgctccctgtgacgttcgggaggcgagtgaacaggtcgttcgtcgtgacccctgctcctgcgagtagatcctgtaccggtgattctgaggcttgactaatgatgatcatgggatcggaagtgagggactcggctaccagtcggggtgcgggtgcttgcggagttggctggaaccaaggcagcgatcatggtcttcgtctggttcaagatgttgacaacatgatcggcttggttgagtgcgtcttccttgaggagggtgtcgaggagagtgattgctgcaaccgcgttctgctgggaggtgcgaaagaccgctgtcccgtcgacgtcttgttgcctaatgagctctctcgcatggggacctggtctctccccaactggtttgaatccgagtcaaggagagagatcttgccgaagtcgttggtgatgaagttgaggctgccgaacctgaacgcctgcccgggagggaaggcgaagtcgtcgatgccagaaacgaaacccatcgcacttagtcggcgagaacttgacgctgcccctacctggcgcgctaactgtcgaaacaagatttcggcaataataaaaggggtggctatcaagctagaaaagtggatgggtttggagacaaggaattttatacaggttcaggccttcttattcaagaagtaataccctactcctgtccggggatgattccgccgagtgtgttattgattgtatgattgggagaaaagaaatcgtgccccaagaggtacacggaccctccttatataggggaagggatccgtaatacaaagtacaatccatatcctaacggaatatggaattacagataaaatacaatcgtaaccgactaggatcccgggtattttcttgacatacaagtttagaacctaacccgagtcctcataaagatattctatctatatttggtaccgtatatccagctggaatataaccgccatgtagatatggggtaaccataatctccacaagcgctttcgtctctcctgacggtatccggagacaccgtaggggaatagccatgcctatccctgaagttgatatccggcggcgtgtcttggcatacgttggcttgtatgttgtctcgtgtattgtgttggttgttgattgtggtgggtctcgatcgtgttgatcgtctgtcgattgtcttgtctcccctctctttttagggggtcttgtatttatacctataggtgtccccttgtccaagtagaactagggaaaccaatatggatacaatccgagtagtcctggtcgtttccatgtagaactctggttgtctttctttatccggaactctctccatatccgcaggttgttttcgtataggacatggtatgtggtgggccctgccgagatgtagtcgactactattaggtatgtggtattcataaccctgacatagccctcaacagcacaaccgtataagcttgccaattaacacttgtgagcaataataatctgaaacccaacaacaccttttcctgtcgggcggaaatggcaaaccaaacaagcaaaacccctgctggcttggccaggcaagcatcaattgaagtcaaatttgacaaaaatgaagctaaatatgccaaacttgtcttaagtctttcaaagttatgccaaatttgttataaatatgtcaaaagtttccaaataaacaaatctttcatataacagggtgatatgactaagagcaaaaatggcaatttacctttagttaacgatgttatcttgcctttatggaatatggtcagtcttaagcaaactcaaaatagtaaggttagattggtagctaaaactagttgataccacacgctttgctacggaatatgtgatgaattaattcatgttactccctccgttctagaatataagaagttttagagttggacgtgattattaagaaagtagataaaaataaatggtgaagggttgtgattggataagtagtggaggtaggtgggaaaagtaaatggtggagggttgtgattggttgagaagagaatgttgatggagaagttgttatattttaggacaaatcctgagagcaaaaagtttatattttgggacagatgaagtatatattatagaaatggtagatgtatatatttaaataatgtgaaaatgatgtggagataatgatttgatatttgtttgcatattgagttctaaaaatacaataaaaatataaatggtatgttttgtttgcatgatatttaaaatattctagataataatttctagtaagtgatgatgtgatacacttgcatgtgatttaaaatattctaaataatactacatctgtcccataatataaatatttttagaggtggacacggttattaagaaagtactactaggtagaagtgaatgatgcagtgttgtgatttgttgagtagtggaggtaggtagaaaaagtaaatggtagagagttgtgattggttgggaagagaatgttgatagagaagttatattttgggacaaatcttgagggctaaagttgttatattttgagacgggggagtaattgctaatgggtgatgatgtgacacatttgtatgttgatgagacgggggagtatttgtatgttgatgagttttaaaaattagtgtacgtcaattttaagatagaatttagaaaagggtcgaataagaaattacccctgattcggtataaggtggctcggcggatgggtaacaaaggcgcagtgggctaagcttggcaagtatgaaggacaattgggccgagccacacttgatagaaatgacttcaatcgaagccaatttgaggtgggctgcctgtagaattaatggatggttaatccgggcttaattggttctagctagctagcagagtaagaatgaagagagatacgagtagcaacgaaggtacaagtggaatcggttgcctcagatatctagacagatgtgtttaatgacgtagatttgaccgaacaaattgtacagtaatgtactaggatataacgaacagatagagaggcattgcatttgcacggccgctgtgtttgaattaattgatggacaaatgaaacacaaaaaagggtcacggtggacaaggatgcatggccagccggttggtaatgtatgataatcctattggaaatggttgcactggtccagtaccaactgcatgctgcttgcctgccactgccatgagcccatgagtgagagtgaggagtagcaaagtgcatgccagcatgtgcagcacgcagagacagagggcacgtgccttggctgcatgcgatgcgtttgtatgcatgcgtgcgtatggcatctttctttcttctttctagctctagtggatccaatatcgagtggggtgggggtagtaatttctccatttctttctgtgcatcgcaaacactttccaatgcaacacagctaagctagtagtactacgccaggagcattctgcagtgcgagcatgccaggccaagagtaagtatagagatagatgatctgtccgtctgtccgtccgtctgtctctgtctgtattgtaaagcgcatgcaatgcagtgagaattagtcatgaatgaatgtagtattatccagctctctcttctcgatcgccactaccagccgcatgctgctggtgctatacatactacatacgtacaattaataattattatttccagtaccatatagtattattcttgtctaataatctagctagctccaaagccaaagcagagtgggtacgaacgaggtatacatacatacatagcttaattagcagcacggtagctctaagacggatcgatcgatgcagagcagcagcaggcaatggcatcagcaatggcgtcgtcccagtcccatctggatctggtacagctgctaatcgttgtggtgatgactatgacgatgctggtgggtggcggcgaggcgctgagcctggactactacgccaagagctgccccaaggcggaggcggcggtggcggcggcggtgaagcaggccatggccaaagaccgcacggtgccggccggcctgctccgcctgcatttccacgactgcttcgtcagggtaactagctagctactctatcgaattcgaatatatatatattaacatcaatgaaggaagctgctagctagctgcaggggtgcgacggttccgtgcttttggactcgtcggggaacatgtcggcggagaaggacggcccacccaacgcgtcgctgcacgccttctacgtcatcgacaacgccaaggccgccgtcgaagccctctgccccggcgtcgtctcctgcgctgacatcctcgcgctggccgccagggacgcagtcgccatggtaatccggccggccctcaatcaaattaagtagtaaatacaggagtatatcaatatatagctagatgagatggagtactaaacgtacgtacgtactgcatgcagtccggtggtccttcttggcaagtgccggtgggtcgtcgtgacgggcgcgtgtcgctggcgagcgagacgacgacggcgctaccggggccgacggcgagcttcgaccagctgaagcaggcgttccacgggcgcgggatgtcgaccaaggacctggtggtgctgtcggggggtcacacgcttggcttcgcacactgctcctccttccagaaccgcatccagccgcagggcgtcgaccccgcgcttcacccctccttcgccgccaccctccgccgctcctgcccacccaacaacaccgccaggtctgccggctcctccctcgaccccacctcctccgccttcgacaacttctactatcggatgctgctctccggccgtggccttctctcctccgacgaggcgctgctcacccaccccaagacgcgcgcccaggtcacgctctacgccgcgtcgcagcccgccttcttccgtgacttcgtcgactccatgctacggatgagctccctcaacaacgtcgccggcgaggtccgagccaactgcaggcgcgtcaactagctagctatttccactagcatcatatcgatcacactatcttatcttatccaccacaccatccctgcactgcatgtatggcctcaactcaactcaacttatgtacaacaacaatataacgtcgaatggctatagcatcttttaatttgttactaattttaattttccaatatccatggcccatggcagagtctcagtctcggatcgatcaaaatagacctccgcttctctgcagatcgatcgagaaccaatccaacaaacactagttaatagtttcccatctcaattattactcacgatatattgctaagcaaggacgatatatagcatctataaccagcaatataatgctcctcaaaattaaaccaagtgtccaacagcaatatatatatacatgcgtgcatcaagattaatttgtatattgttcggtaacctatctaaagatcttatcatagcaattagcttagctatctgtatttttcgacgacctggttatggccggatccagcttctggcgatcctagctagggggcgtgctctcaacaccgttgctcaagtagttgccatcgggctacgggagcttcgaatcagcacattcgccctaccccattgctgctgtaaacctctccgatcgaactggtgaagatggtgggccaaggtgccgccggcgcgcgcaactcgccaccttccttcccgttgcaagccacctcccgtcaccgtcgctgctgtcactcaaagcctaggaggaggtcgagcacaaatcaccgtaaatctgcaactgaagtcgtcgttgctatgagcatcgacatcggtgatgtccgtgggcaccacacgccttcttggaggtgatgctgatagatcctcctggtgaaaacttagtttcagatgggcggaatagtaatggcatcggaggttttatgttggtgcgatactcttggtggctgcgtttttatcagattggtttactgggttttatgtcaaatctgggtggatgactgtttatagctaagttactcttctatgtcatcttccgctttcattcgacattagttactgccgatgatattgttgatgctgaaaacattaatgtatgtagatctgcttagttttagtgcaggtcctaaattattgatgagatgcgagcgtgctagccagtttgattctgcaaatgataaaatagataaatcgatgatcaaagagtcgattggccaataagccgatgtagcggtaatagccgatatcgatagagttttgaacaatcagctatatgtccgatatagattctgatacttgaataaatgatacaaagataattggacaagcagtgaacttataataatacaacaatataattcaataaaaaccaatggaccaataatagtatgattgaataaatactaatccgatggttaaagtatatatcggctgaaaacccgatgtcattaaatccaaatgattaagtaatcaatgaaacttttgttgcaatcagctaaaaccaacttgtatataatctctataagccgatagaacacttaaacaatgtccaaataactcatcggctgaaaccccgatgaaacaatgattgatgcctactgacttaaataaatataacttacaacaacaacctcataggtcgagcctaaccgatgcagcataagattgataattgcctaatagatttaaacaagccgagatgataccgatcaaatttgtcatgcattaaatttaactaagatagaaaaaccatcaaagagaaatttaatacatcagataagatcgactaaacctctgatgaaacattagcatgcacctatttgcttaacaagatttagattatcggtaccaatctagtaggttagaactaaccgatgcagcacgagattgtacatgataatttaatactcaataagtcgatgaatctatctaatgtgatagatataacaaatctatttaaaatcatattgtgattgtagagatatatcgactaagacaagaccagggctaatgaaacttagggtttacctcttcgccagagatcgaagccgatgtagccccgcgtcaggtgccaagttctgttggtgataataaccttgcaaaagagggcagctatgcactgagaatatttgtggagatagattacagggatccagggtgtacatagttatacccataggccgataagagtcctaatttgacatgacgcaatatttcttaaagataaagaaaagatactaaacacactttcctcgaaataaaaagaaaactaactgactatgctcaattaatagataaattaacataccgcatcctccttaaactcggcctcttctggataaccttcttttaattaattaatttccttaactgaatccataaaaaatccaactattggaggctgataatatccatcgacccattttaggtatatgaagccgatacttcctctaggcgaatgataactttggattttaccaattttgacgttaacagatatatgctcatcgatcgacataatgatcacctattgattatcaagatgttgtttttttggaaaacaatgttagtatagtcattttgttctgaactagcatggtggcccgcacagattgctcggctagcactgttatattttctcacataaataacatatatattttcatatattattattagaatggcaacataatttgaaattatgtactaagtagaacaaactaaccaatatataatttttatattgtattgtatacacgtgatagttatcaattatttttttaattctgaattttagttattttgaattgtatttctatatggactatgaattcctcttccaatattctttattttttaattcgaagttccattatttactcctatttgaatatttttttagtttcaaatttttgttatttgtaaattatatttctatataaactctataatattgtttcaatatgccttattttaaattttaaattttagttatttataaattgtattcctatatggtctctaaactcttcttctaatatttcttatttttaaattccaaatttcagttatttctaaactctttctaaagtgtatttctacatggactgtaaactctacttttacttttttcttatttttaattccaactttcaattcttttaaattcctttatgaactctaaactttatgaattttaattatctctaaattgtattcctatatggactctagactcttcttcccatattccttaatttttaattttatttatttctaaaatgtatttctatatggactttgactatacttttattttttaaattttaaatttcaattaagtctaaatcgtattcctttatggactcttcttccaatatttttttaatttctaattttagctatttaaattgtatttctatatggactcgttttttattttttttattaatatgagaatttttaggccgtgagagcgaacatggagactctttttttattattttgatatgttaatagattgtaacccctaataaaaaaaatcatacaaaatgtatgtcattttgaagaaacaatgattatgtagattctcatcaaccatagatgaaaaacctcaatctttaaggtggtattttaaatagctttcttatgttttaatcaacccgtgattttgtaattcatatccattcatcgtacgacctctgtaataattggttatagtttcttaggaatgaaatatattattaaaaaaatatgtttttgaagaaataataatccctcaatcattcttacttctctaggctcgtatagtataaatgtaataataaaaaaatagggtcgaaaattgttgttattatgatcgccatcacaccatgttcatcgaataggggcttctctgcaaaatgttttatcttattctactagtactagtagggatgaaaggaaggtaatgtaatagtggagtttttgttggacctgagtgcaactcagtgtctgtcggcttttgcttctgcttctgcttctggttctggttcgccttcctagttcctacccccaccagcaagcagcagctgaggtgaggtccgtggcgttggagtgaggactgaggaggaagaagagggcgggatctagggtaccggatgcgctggctgtgctgagtgagagtagagatgagcgcgtctcggttcatcaagtgcgtcaccgtgggggacggcgccgtgggcaagacctgcatgctcatctcctacacctccaacaccttccccacggtaggcaatccgttctttccccccttcttcttctcgatccttcctgcccgcccgagtatgcatctgatcgactccatggtaaacattctttttcttgtcttgggactggggactggggactgggtgtagagaagacatagatcagctttccttccctttttgcttgctaaaatttggggactgatgattatgataacgttattcttctatacgcgtccttctctctgcgggatccaggtgccttcttctccaggtataggaattaggatagtattgccgatttctcagctgccaacattcactccttatacagatctaaatatacactctttagcttcacctccagattttgttgtattactatcaggagtaaataataaactcataaatatatgttgcggtatgtctgactttttgtctgctattactaaccgtggctccatcattccgtagctaatcgccaccattgacctctagacgtttctctttgttggtgaatttgttttagctctgtatcattctaaccgtgacctctgtcaatcaccgtcagtaactcagctaccccttttcgttttgtgcgaaaaaataaatctaatgtattgcatctttgcatttttaattggcagactgtatgtttaatgggacatttcttcatctctatgttacaggactatgttccaactgtttttgataacttcagtgcaaatgttgtggtcgatgggagcactgtgaacttggggttgtgggatacagcaggttctactttcccctccttttaatggatgcatgcgtaaacctccttatatacatccacctttcacggtcatcaaaataaataaaaatttgacaaatttaacaggacaagaggactacaataggctacgcccgttgagctatcgtggcgctgatgttttcctgctggccttttctctgatcagcaaagcaagctatgagaatgtttctaaaaaggcaataaaatcttgccgcccactttctttgctctctctccatgaagtaccttagcttagtcaacctgttatcttgcactgacacatatatatttctgttgtcagtggatacctgaattaaggcattatgctcctggtgtgccaataattctcgttggaacaaagcttggtatgcccttccaactcttgttgcatagcatttgtgcaaagcatcacatatctgtagaattaagctattatattttcactcccacttaccagcagcttggcgttgcacttaactgagtggtgattgctgtcttcctataaattgtctcatcatttgagtgcttgtgtgctgtgaacactctatgaaagcatgtttgtatatgtaaattcaattttactgttattcacagcaaagccatatgcttatgatatctgaaaatcatatttaaatgtaaaatatttgcatgtggaaatctatgtgaacatggtttcatggaagacaagatatttgaattcgacgatagcatgattgctgcccagcagtgttttgactgaatatatggcattataccttgaaacatgttacctgtaacacatgaagtgttatatgctatcaggggacatttgtagatgcttggtgacctggtgtccctcaggattgcaggacatgcattatatcaagaatgtttgttttttggtgggtgacatccttagactaacgctgaatgtttttttttttcaaatttagattttgtggggaatcggtagctaagagtctcttattccactatgggtggcatagttccattagaattgctggataaaaaatctatgtggtttaatgctagtcaataataaaggagagttaagggtttgtccagggccgtctccaggaattgggggccccggagcgaaatataatttgagatcctaaatttacttttgattcggtccttaatttaaattcgtaattatattcatggtaatttgatttgaaaagaagagtactgaaatattcaattgatcattacatgcatgcaattcaacaattgagtatcaacaattcagtattagaaactctaatatgatagacgaggtagtcggccagctgctctgggcatcgtaaccattgatcaaggattcagaagctggttcgcatgcatgcacatgaacacacacatgacatcagttgtatatgctaaggctggctggttgtactggtctctctgatttgggggccccaaatttttgtggggccctgcgctgacgctccgttggcacgccctcgttgacgggcctgggtttgtcccatcaccttatggctcattttcctgttttgaacaaacttatggctgtcttatggtagaaagctggagatgtaaatcatttccattatctaagaatgtttgaaattaatgctttctttttttgcttgattgttaaccattacctcagcaacatttcacatgctatgacagttgagtatcatagctagtttgagagacaaatgagcatgcaatggttttgtttgtatttcattgagaccttgacgatcctgccctgcaaatgggtctttactagtctccaaagttaagcctgtgacctatactccagttggtcctgtacatatcacttattgatttatgatcaagaaaagaaaattcctctgaaatatattttgtcttgttccttcagcaaatgctaaatgttgataaatctgcatttctagttttcatgctaagttgctaataaaaaggcacatatgacccgatccaataccttacactgcatgattgaataccatgagaattccattctgttgatctcacaaggcaggtgggcttttaggattgtcccctgggaacacatcctctgtaggctatttattcacggtttcatactgcatgctcagttaaaatggcatctagcgaacatttgaaaggctcaaaatggatgttcaccattgaatttctgctccagcggagcaagttataaatagataaagcctgtacagctaacagcaagttataaatagataaagcctgtacagctaacagccttgtcaacttactggccttagaggcaagttaggtggttagagacttagtcctcactgaccaaaatgggctcttgttagattatgttcttaagttggattactggagttagaaatcaggttcgatgtagcagctttggtggtgcaagttgtactttgctcctgatacaatcatacacaatatagttttcagaaacatgtcctagcctcagcatgtaaatgcaatattcttttgcttttctgttcattgtgcttttattaatcacttgcgtacttgatgtaatccggcggtgcttaaccattaagttactgttaatagatctgcgggatgataagcaatttttcgtagatcaccctggtgctgtacctatttccactgctcaggtattcaaagcttagtttgcttgtatttttgttgcttcccagcattgttacacaagtcattaaaattattttgctaatcaatgtagggcgaagagctgaggaaactcattggtgcagcggcatacattgaatgcagttcaaaaacacagcaagtactacattttattcttcttttttgaaaaagggttcattttactccctcaaattattttgccaaagggcctaggtttttatggttcaccccttaaactagtaaaagggactctactccctaataccatttcacttttttattctccacatacggcaacaggacctgtgtttacagttttttcatgacaattgacatgcggttttaaatctccatgtttaatcagtgttaggtgcttgcaacttgtgcaaacagtgatcttttaaatatataaaaaggttgagacatatggtgtaatacgatttatcatcccacaaacttaacatacaacttttataaagagaaacaaaaaatagtgagcccaaatatagttgaggggtttgattgctgatccggtgatttttgaatcaatgctgatccggtgatatagttgaagggagtaaaatggacttgttgcgttgagctccattgcggtggcatggttactgattgctgctgctttgcctttgcaactgcagaacatcaaggcagttttcgatgctgcgattaaggtggttctccagcctccaaagcaaaagaagaagaagaaaaaggcgcagaaaggatgtgccatcttgtaattaaatggtagacagtgcagtgcagatcgatgtatcccttcatttgtagcctctggcttcaatcgtcgcttgtttgtataattacgctagatgccaccggcagaagatataatatagtcctcctgcctttgtggtgttggtctctaaggtcgtccagactccagagtccagacgcatttggtttcttttgttctatctataatcaatctatctatatctgctagtgttgtgcttctgctagttatgcggatgagaaagggaatttaccttccctgtttctgggcttctggcttgcacgggaaaggtcggtttgtttgcaatatactactaccactccagcttgctaggttgattaaaataagctaccagtaagaatcgatatgacgtatcagcattttattaaatcagtgattaattttatcataaccttatattctactctccgatcgttctccatctctttccctagcggtcttgcaatgcttggtgccgtgtcctcgatgggaggatcattttggcatcgccattatgtctccctctttgtttttcacagtgagttgcatggccatatgtaagttgtgtttagttaagcgtaaagtttggataaagtttagattttgattgaaattaaagataatgtgactgaaaagttgtgtgtatatgacatattgatataatggaaaagaactgaagtttggatccaaactttatatctaaacaagaccgtaatatcgaaatccagaacagtactgaagttaaaagcgcaaaagcagttgaccttggcatgatcacacacggcatctggactggctacatcaaacgatcggtatatataggcatccgttgatcttgttattgttgctgatatgccttacaattaattatagagatgattgcatcacatactatatttataactttgaaatagataactcattattggttaatgaatatgtgatttattcatgtgacctttttatgttgtatgttgctatttctaaagaatccttaatcaaatatcatatgtggaacaaatatggtttaatgatcaacacatgtattgaatgatcatgtcttatgaatcatggtatggaggcaccaaattaataatgtggacacatgttggaaaacatgttgttggatagatctaacatgagaggctatatatgacgtgccatcagtgatcttatttagtgttagtgtaaatccttagacctgagattattatgattcccaatatatgtagtagcttacttaggactgccaaacgctactccgtgatttagtagttataaaagtagtcttcgggtatgctatgaaacatgtagtgggatagaataatcaagatggatgtgcccctcctatggagagatatctctgggcccctcaatgttatagattatagaagtacatagccatgccaaagtgattgagtagtcaattacatgttaaataatctatcaaaagatcgaatgaatgattgagctattaaaggatggtacatatttaaccttgagcttaatcgatatcgtgaggcgaaggggttcatacaagtgtatataaaggttcaatcgatatgatctttatgtatgttctgctaggagccgctgttgacacgtggactgaaaaggagtttccatgttgtagcagagtgtacatgaacctacggagtcacacactcaataggccgaaataagagaattggatgaagatccaatatgtacttaattcggatagggatccgagtatgattcttatgtgtctccaggcccagttacttatatattcttgaggtgatgtgactggtgtcccacaagaaactctagccgtcctctcccgagccaaaccctagccacacgcgggcgctagcacatccgcgcgtggcattccgcctttagacgtgtagatatcggtagagacgccgctggtttgcggtgctgatcgacgtgagagcacggcaaggcaaacacacgagacggagaaggttggactgctgcgatcaatgcttcctcaacatagacgtgcactacgtcgccgatcttctttcggcttcttaacgcctacttctactgcacaatgtgttgagtagtaatgattcatgattttatagttgcatggtttctggttaatacagtagaaaaattttgattcatggtataatagactaatcagatgctatcagctctcctttcaagtcgatctgaatgtattatttaaatgaattctcgtgaaagcggcagttgtgcagatatatttcatgaagaaataaatggaattgcggaggaaaaggaagccgtcgccgctggcggtggtggcccctccaatgatgattggtttacaagaatgttgtttgagtgctaggttacaattttacccatccgtattcatatttcttttacaattataccccttcatatttctactactttaccttaactgtactaggttacattacaattttacccatttatattcatatttcttttacaactatacctcttcatatttatactactttcaaaatatttctactacatttaaataagatggtaatataaatggattccttaataagatggtagtataaataagatgggtaataatctctctgacgaaggtctgttttgagatggaatgaagatagaaattaagtacgaacatgtaaagtgaaaagtctattacgtactccctccgtcccggaaaatatcgattcctggattcccgaggtaggacgaaagtgaaaataccaaagtaccctcattaaggtcaacactgccgctatctatatccattaattaatactactagtacagcacgtacaggaaacatctatgacagaaaaaaggggcaaaataaattgaatttttgcactgccgaaagaagaacatctcagcaatatgaaaaaacacatacaggagacatctatgacagaaaaaaaaggcaaaataaatcgaatatttgcactgccgaaagaagagacatctcagcaatctgaaaaaaaaaagaattgctctcaattcagatgaaagaactaatttttacatttgtcagagaaaagatagcatccctccaatcagggaaaaaaataaatgattttaattcacctgtatgaactagcaagtaccaagaacatagaagaaccaagaatagagaaaaaaaaggaaatctgcatcagatccccaacggcaccgcatccagcagtcacctccaccttctccatgaaaacagcatgccactgtcttcgctgccgctgcatccatccgacgccaccgtcggcttcaatggacctgcttccccgcaaacctttgcctcagccgccacatcccagccgccgcatcggacgcagaaaatcacggctagaggagagtgaggggtggagcaggactgcaggagggagggggagaggggtggaaggggcaggaggatcggcgaggttccacatctggacgccgccgcgagagaacgagagagagatgcgagaggcttgggaacagtggcgggcccaggattttaaacttgtgtattcgaaatagaaaggggtaaaaaaaatttgttcatagacctaaaaacctaataattggctaattggcttgtatagtatcacaaactaataattatataatatatagcgtatatagcataaaattgagcataaattcacacattgatagaattgatcatcatttgaaattgtttaacatatagaatactaattagtaaacatatcaaagtgccaacatatgaaatacataaagggtagaaaatgataaattgggaagaaatcttacagtttggagatcaacttttcgttgtttgatattttggaaataagtgatgatgtccttgtctttaatttgcaagaaaaattctctttcaatgaatgtaactaaacaatcattcaactattgttgccctatcttgcttctcaagttcatacattatgatacaaagcacaaattagcatatatgatgcacagaaatatgtttgctaagtcgctagtaatctcaattaaaaaaaggttgttagcccattactagttcatccaacatcaggatcaggaacacatggatgctaaacatagaaaatcatgcgaaactgaaatcttgatgcaaaacctaagtaccgaggggattcacatgagacaggagctagggattaaaccaaaccaggaggaaggatcgccggggggtgcggtcgttacctcggggctcgggacttgatttcttcgcgctgggcctcgaggcgggtagagcttgtcgtccatggccgcactgccgctgtcgcagcaggccgcgcgtcgcgccgcaatgccgctgtcgccgcaggccgcgccgcgccgctgcctcacgagtcagccgctgccccgcgccctggcgccaagccgagtggtcctcttcctgcgtcgacgcctccacggccgtgcgcccgctccgccgccaccctaggagatgctgcgccagtgcgtccagccggcagccgcccctgcctggctggctgccccgcggtcgccggctcgccgccgccgtacaccgcgcccgccgccgcaccgcacgccgcacgcagcgccccccgccgcccgtctccttgcaaagctagggttaggttagggaatttgggaattggggattttgggttagctgcctggcaggtgagtttggcttcgaaatggtcttagttgcggcccaagtagactacgggccgagtgaaagggggaggaaggtggaaaatttagacccaatagagaaagaaatggcaaaacgaggcccaaatgagtagtttaagtctttttctttaactttttgaatacatatatgaactatagagtatatatacctattttttgtctaaaaatcttgggtatagggtttagggtatacatctgaatacccttgaattatagctgggcccgcccctgcttgggaagagataaggtttgggcgtgtaaacgggggaggtcgttgccctctatatccactgctactaccctccgtattcattagtatggcccacaaacgattggatggagtttctcgttttttttgctagaatcggtttttttttgacaaacccctcaggattcgatttatttaattagaaaataggtttatttgatattttagaaaaaaaccattttcttactaagcatacatttaataattaaaaaaatgctaacacaaatcaaaataaaatatgtatcttaatcggaatcagaaaaaggaacgagaccggcaggcactgagatacaccggtaagtactaataataaacttgtagtactgggaggaggaggaggatgaagaagagcaaaggcacagcagcggcggcggcgctgctgcaggagagagagagactagtgttgtcagggacgctgaagcagccgtgagactggtggacgcccttgccggcggcctcgagcaggaaggtggagttggcgctgccgctgctgaagaggaggcaccagaagaagggcccgcggcggtgcgcgcggtcgaacccggcgcccacctgggtgtgctccttgccgcggatgaccgctctagcggcggtgctgttgccggagccggagagcacggcctccagcgcggcctccgcgtcggagcgctggcggtggcagccgaggaggcggcccgtgatgacgtccaccgtggggagctcgacgccgcagttggcggcgtacacctcggtgatgtgggcctcggggggctggcacgccaccgtgttgtcaccggcgcacccaatgccaatgccaatgcagtcggagatgtactgcagcgccatgcagccaaggccagcgctggtgcgcagatgaggcagcttggtcgccgtccggttggcgttcaccagcgccaccaggtcgttcgcggggttccctgaatgtcgtcgtcgttcacttagtcatcacatactactccactactgcatactactactactagtactacttgatataggagtagtagatcgaagagtactcggaggagaatgcatggaagctttggttaccgaccgtggatctttgcaggggaaacagcttccagcatcagcagcagcatccagaggccgaagctgctccagatctcccgcatcctccctccctccccgtcttcttcttttgttgcagcagctgcgagtgcgagtgctcgcagatcgcaagcagctagcgcaagaaatattaatggtggtggattaatggagtgggggaaagaagcaggcaggcagccaggctttgcggcctcatcaatcagtcctcttgtctctgctgctccacttcttgtttgagcccaagaggagcgagggagagcctgagacaggacaggggtgtttgtgtcattgcttgcgtgtaccgtactcccttcttcccataaaaaccaactagatgtgatatattatagtacaataaatctagacaacactaattataaatattaaatgtagactattaataaaacacatccataatcttagactaattcgcgagacgaatctattgagactaattaattcatgattagcctatgtgatgctaccgtaaacattctctaattatggattaattaggtttaaaaaatttgtctcacaaattagctttcacttatataattagttttataagtagttatatttaatactctaaattagtttctaaaaacggagtaagtaggtggcagacactagagtcaaatgccgtccaaacgtgaaaaataaaaacaccggcaccgcattcatggagactagtctaggctaggggcccaacgcgcattactggctactatgcctttacttttttctaagggacaaatgtgcctatgatcctattttaatgaccttgttctattaactttgtttgattgactctccttttaaaaatcaaagctattatttgactttattctgaccacgacgttagcaacaaatttaaaaagatgcaattagaatatactacatccatttcaaattagatgttgttttgacattttgcttacatcgtttgatcgctcgtcttatttaaaaaaacagtgtaaatataaaaaatggtaagtcatacttacttttgataataaagcaaatcacaaataaaaataaataataatttcataatcttttaaataagatgaatggtcaaacgctacaacaaaaacttaaaatgataggtattttggtacggagggagtaagaaagaccgaaatgcgggaagggaatagaacccaacctcaaaaatctatccctatccctgtctcaactggtctaaaccagagagaggagaggagcacaggcggtgcggcatgaacatagaaggatgagagacaacgatggtgattatcggggtgaggttcggttcctatgcgacacggagaggcgccccgagtagggcgaccagggtttcccaaaccgctgggggcaaggttaccgcgcggtaaccggacaaaatttatcaaaaattcaaattactttttaaatttatttgaatttaaggaggttaccgtggtttttctattaccgtaccccgcgcggttaccgacggtaatgtaaaccctgagggtgacagggccggtggcaaagaggtgggtgctttgtaaggccggtggagccgagttgtggcgattagcttaggtccactcttacgagtggtgttaaattatttgccactggacccacatgtcatagacacatgagggcccacatgtcatagacagacaacgagtggcaaataattaattgccacgtcttaaaagtggcatggagttaaatgtccccaccagcggaggtgcaaggagagggacatctcccgagcagagggagccgccagtagatgatggccgacgatgagggctggtggagaaaaacggtgagtggcaaggccgactggtggtagtatagtgggtgttgtgcagcgcgggcgacggggatctaggaggagcaagctggcgaggaagggggccgagctgcacgccggcacggaaggaagcggagttgtggcgaagatgagccgtagtgccccctggcagtgcgcggggaggaagtctagcagccaatcgggtggagacgtagacggagatgtcccaacggtgctagcatcggtgaggtcccatgtgacgtccttgagcggtggagacctaggggcgtggaggacagcgccagcggtgggtggcctgatgaagatccacaaatgcgagcacagagaaggttgggatagtaggcgaggacggcctaccaatctgtgcagagaggtgctaggcaacaggaagagcatcgagccctaatggtggtggcctaggggttcaccgacggtggagacgatcgacaggggtgggatagggtttagaggtgaggtcaaccgccaacaacgacccaggttcagatcctggggtggggaggatggccaatgtggattgcttcttagctattgcttgacacaaattgacgatgatgcctccaacgaagtatctagcaaatctaagtcaaatttgtcacatatatgtaaacccctacactaagtgcacaatttataaaaaaatctttcttaattttccaccatacaaaactagtcaaactaattaaaagctttgggaaaatatggtcaaatgagcaaggacagaagtggtattttgggcttcagttagcaccgttatatggtcttaacagaatagggtcataccatatctttggttttgaaaagtaggatcaaacaagtaaagttgttaaaaaaatatgaccacattgatagttcgccttcaaaatagggtaagatgtgcaattgttcttttttcagcacaaccctattcaatttgctagtgtcaaatcattttaggcaaacgagacaaacctaagagcaagtttataatagaggtgactgctacctctaattcattccatatcatccgtctctaagttaggatataactgtttagggtggaaaataacatctgagatctcatttgtttagagatacatatatgtgcgggcgtgccagtgtacctaaatacacaatgtaaacaaaacatagggaacatgctctttattaatcttaaaagatcataaatacaaattcccaatgtaatatatatgtatgcgcgctccataatatgtcattggacagatctgacttgtgcgatgtggtctcctggttcctggggcctcgagaagctcccagttaattacctccataggtctaggcctgcaagagaacctccgattaagctgcttgtggtcatctcgtcgtgttcgcttcgcgttctccatgcatggttgtgatgatgatgtagatgtgtgtgtgtgtgtgtgagcgccggcagcgatccatggcctcgtcggtccgtgcgccggtgttggttgcccaccctccgttgtctagcctcgtcggtcttgaacaacgtgtcgatgtagattgttggtgaagacatgcatggagttgcgtagcttgaacgacttgacgtcacagctgttgcgtcgagattagattagagaagaatcagggaggaattattgaagatggttgatgtagacggcggccggatttaatcaaagctcggcatctcatttgggacaaataagaaaaaccaacaggacttcttcagcccacgcattggtttgtgcatggcactgtagcagcgatgacatgtcgtcctccgattggttggccacgttgccacaataattaacttaatcaacatgcattacctagcttgttgccatccaacagcactggctcgccgtcctcccgtcgtccttcctctgtactgcagccatacttgcctccatcatcatccgctggttttgacgccatgcgtgatgcttgacctccggcatgagaactgatagaagtcttggcagtcggcggcagctccggcgatcctcggcgcgctccggcagggcggcttcccgacgacctcctccatggttagcccgctccagtgcggtgaagcttgcaaatcaagaatgtctggtatctcgacgaggtcgcagcttcgggtagatgcatcaccagcggcttgaattagcagcgtcgagtccagggacaagtagcactgcgtcagcttgaacagacaccggcatcgatgaggcttctgtgacgcgtagatgaatcggccaccgcaacttccccagcgacgacgatacgtgcagatggatccctatgcatggatgtgtgcgtgttgtagatgaaagaaaacgaaacaatcttgctagcttttacctggactagccatcaagctcctctcctgcgcttgctgatgatcggatcaccgcgcgcgccctctcctaccggacaccgggactccggccgaagtcgctcgccgccgccggtgcgtgtcgtcgatggatggatcaccgatgagagttgatggatagatcgccgatgagagttgatggatggatgtgttgatgctggatgggtagatgcgttgatgatgggtggcttgtggatgctagatgcgttggtgaatgaatgtgtggatgagttcgccaatgcccctggctgccgaggggtcgacgccttatataggggtctggggtcggtgctcgccgcgttcgcgcgccgtttcctccgcgtcaagttcgttgcagataaggcttgatcgatcagtttgttatttgttcatatccttctttgattttatctcttagcttctcctggcgtcaaatatctgatttgtaattcgctttgtttctctgctgctgggccacagtccggtgataagcgcctcgccagcgctcgcgcgaagtaactaactagatcaagtttgttatagagataaaatcaattggtttgttggttatctcttaattcatctggttttatctcttccgcatattaacttctgaaatcttggtgcgtaggcagctaccgtcttcggccatgggccgagcccatgattaatcacttggatatgcataggttgcttaatcacccaggcatgcacacacatacgaccgtctactatagtacatgcatgcatgcacgtgattgcctcactagccaatcttcacacggctagttattggttaattatacatgcacatatactaatccaagtatatatattcccagctgcctgtgcatgcatgtatttgcgtgtatatacatggccgagcattgcatagaaatgataagctagccaacttacaaactgcttgtttgctttgtccatcatgagtaagtcttgtgtacacatataatcgccaaaataccatcaaacagatgccccccaccaagtaaattttgatcgtggagcgagcgaaattaacttggtgtcgtgttggctcatgcaatacatgtccggtagagtttagtcatgcgacgaaaggactcccatgctgaagcttatctccggccgtgcggcgaaagaaaaacaaagctagaccgtcatcggccaggactccaaatccttggcagttacgagtaatttggatgaagcctatatattgctggtcatgcctgtgcatcgattatgcaatatggcgcctcaggtgtttaactccatcacaggtatatatccattgtcgattctttagccgctggaattaggacgcttcttgatcatcctgtacttttttattaggcaaccatcttgagatggccagggaagacggagcatccaggggtgcaggcgagcgtggcgccagcgaccggggcggcggagagcgtgtcccgcgagacgggcagagaacgggggacaggcgagtaacatgggacaggcgctcggcaggagatagacacactgtcgaagataagctcccgggaggatccggcggcaagcaatagatggagaccaagggtgacgacccttcccagcatatcgcgaagatcccggtccgtagagatgatcgaggaggatacaaatgccacggcgagtcaatcaaattcctgcgtgactggcgtcataagaaggagagaactgctcgtcctgacagacttccattgccgaaatcttctaaaaagggtctgcgtattgaagattctccacaccccgagctagaccgcaccatgcgtgagaagcgaggaaaaaaccccgtagtttatgagagggtgtcatccacggagtcttcaagcgatgatcgccgccgccgccgccgctctgtggttcccgacacggagcttgatgctgtccagttgagcgactcctcctcctcctcttcttcttcttctgatggcactggcaaggtatccgtgtttccccaattctttttttttctcttaaaattctatgtcatagtggtttgataacctgtctcttagaatatacttgcaactcaggatacgatagagcatgcaactgctttgggtggacttaaagctactgcctcttccgatgttgctccggtacctattgacgatgtaccttcagttgtgccggctgctaatgctcctgtccgctcttctccggtgatgccggcggctgatgccgcttcagctccgggaccctcgactcaaaagcatcaggaaggtaaggatgattagactcctaatagaggtcatattctcctttgctttcttttgatgtattttcttctttctttgctttttctgagaaaagtgtactatacccattgtagaaacttcaggcaatccatccgacacagcttgccagatgaacgagttgatggagaagacgtcccgttaccttgctgagttcgggacgtgcggtcgctatctccaacttaactctgtgagttcggcgactgacgaattgccgacgctggagcttccaaagtccacgcttactgaacgtcgcaacgcccacatggtggaggaggatctatttagcatccaagattgtttgatggagaaacccctgaacaaggagggcaccatagagtacattggtgctgccaccgctgcatgggaaaatagttacgagcttggacgccccgcagacttggagaagttgatgtcttacttgggggcacttgtgcaacgtcttaagggagagctcccggtaacctttgaagggagaactttagctgctcatgaaggcgaggcgcgctcttccttagcaaagcttgagagtgcgtgttcagacgtgctaccagaccttgacctcctcaagagtggctgtgaagacgtggccgcggatcttcagaagtccaagcaagcaggggctacctggaagaaagaggcggaggaacacgagctgaaagccaaagatgcgagggagaaggagcaccagtgtttggaatcagaggaggcagccgccaagaacctgcaagtttatgatagtaccatcgatggcgtcacgcagctgataaagcgtcgtgacgaggcgaaggtctatttggggcatcttgctgaagagaggaaacgccttgcagtggccgtgccgccagaggtggccgccattctatcatatcgtagagaatcggcgcctcggggtagtacgtcgaagaattagaatagcctccatatgcttctccttggtttaccttaattaggatttttttttcgagtcatgtaaagcacattagaagcgctcttaatttagatgatcagctagctagtttttaatctttgaataaagttggggcattatcatgcacccattaattaggagtacttgttttattatttgagtctgtcatattgtcttcatcgatatatatggagtgcttgtgttttgtcctcttcatttttttttcaacttgctaatatgtatcatcccttctgtatccgaatactcggcactgcgtgcatgtggccaccgtcgcatatagaacccgccgaagatcctgccgggacccgagagctgatatatgggaatatatggctgtaatttataagtgcatgaatacatatgaacttctgttgattatcacggcggcaacatattgagccaaggccagccagcagtttgcattgttaagttaattcctttttaacaaacccatcttgtggcaatgtggccgagcaatcagaggacgacacatcatcaccatgctacagtgtcatgcacaaattctgtactcacgcagctgcatgcatgatctcttccatcaattcctggtttgccttctgtacaagttgcttcatataatagatcaacccatgtggggtagtagcaccattcagaaagtctagcgctttgagaataggtgaagaataaaaatgacttcaggtataagctgtcctcctgaggtctcgaggcgaagattcatgccttcaaataataattaaaggaattttgtcgggaccaagtataggtgccagccaacaaaataacttgaaatcgtctcctactcgcagcgaaaaagacccatgccacaattgaagacattttatcagaccgattgagaccgttgatatatcacggtgcctgcctcatcagcatgaagggtttcacggcttggcgctgaccgcgttggtgcgccgccccgctcccaagaaagaaacatcttatcaatccggacgcgaccacttgactgttgtgatgccgacctgtcaggttgaaagatgtatagcccgatggcgacttcagagtgttatgttgcctccaaatgacgtgaagcgaaaaccctgcatcacaaaaaggaaaaagagagaggaaaagagaaaaaaaactagagtatggttgctagagtcgagcaaaccaggtgagttgatagaaagaaacctagcaagaaaatgattttgttgatttttcttttaaaatgttggctttcccactgaacactggctatgtggtagcgtcagataagattgccgaagaacgtgtcgcgggaatcgccgaacgaccatgacgattgctccctgtcaacctaacttcctagtgtgcttgtgtataggagtagcatacatggtgatactttcagaaggcagcgaaaatccatgctctagcctttcagttcactaggttccaccacgagtcccatgcccccggtattgtgcttcatcgaaccgagagaattaggtatggctgaattaagatagggttataggggaacggctgtgagagtggccttttccttttgccgaggatggtgaatggctatcctcctacttctgacagaatgcagtggagatcactgattgcttggatctttttgtttcttcttttttttttgcttcgcggcttcatgacaccacgacttcattgagattgatattggattgttttcttgagttgagatcatcacgactttgttgagattgatctgggatcttggcatccttagaacttggaggacaaccattcccctttgtgggctatgtaatccttgcaggcccatttcttttgtaaagtcccttgttgacatgcctcacagggatggcaagtggctgcacactgaaccacaacttgtgttgaggtaggtagccctttcttactcttctcctatagtcttccctggggcttggtatctccataggtttgaagcacaccgaaggacacgaaggcgtggggaccttgctactaggaagtaacccaatcaagtctttttgctattcctcggaaatatgcacccgtagtacttgtgtgttggcgtgaaggatgtttagttgtaagcacagtctgtcatggtcatccattgaatcctgtagaggtgttctaaggttgccttgtcttcttctaccagctcagtgtgatatgtggaaagccattttgattttttttgtgggatgtggcatccattttgtaaaacaaaacgtggagcaccagacaatgcaatggccaatgcacgttggcaagctcacagtgtttttttaaagaaaacaagaaaacaagaggcgcagggttttatacaaaatatttttttaagaacctcccgttgattggcggcattggtcgtgatccttgatgatcaatcagctggtaagcacctccgtcatatgcttgctcgatgacatatggcccctcccattttggctcgaactttcccttcgtcttgtgtgtaacgacgatgggacgtcgcagaacgagtacgagctcgcccttcctgaagactcgttgcttgacgagcttatcataggctctcaccatgttttggcgatacaactccaaattttgaagggcgcctaggcgctcttcctccacggcatcaagctcctgaaatcggaggcgaatatgttcgtctttagtaagttcatcgtggattgctactcgtagagatggtagctgaatctccaatggcaacacagcttcactcccatagacgagagagtatggggtggcttgtgtcggggtacgaactgtgactcagtacgcccatagtgcttcataaagacgatcatgccaatcccttcgatgcttgtctaccgtcttctttaagatcttgccgagggtcttgttgaaggcttcggccatcccatttgcttgagggtaataaccggtggagtagttccatttgatcttgtatttctccatgaacctatagatcttctgggacttaaaggatttggcgttgtcggaggtaatgcgatgtggtaccccgaagcggtagatgatgtgtcgttcgaggaagttgatgacgtcactgctcttcacttcacgcagtggcacagcttccgcccacttggagaagtagtctattgcagcgaggatgaagcgatgcccccttggagaaggtggatcgatgaggccgatgacgtcgattccccaggcatcgaacggccaagaagggaccgtcgggtgaagcggagccggcggttggtgcttgaaattgtcatggatctggcagccatgacaggttttagctgtcttcaggcaatccgccataatgcctggccaatagtaccctgccagtcggatgctatggtacatttttggtctgctttgatgcccaccgcatactccatggtggacttcttggagaacttgattggcttcactccgatcaacgcaccgaagtaagacctcttgcccgtaagaccgcttgtagaggacaccggccttgtagatgtatgagggaagtcgtcgctgtagttggcgtctctcgacaggatcttcaggtagagagccgtgcttgaagtaatcgaggaagggttgacgccagtcttcctctttagcagaattagtcgtgatgatgttaacttcttcggggatgagctctaggacagctggaaggagccacctttcttcaacaacaacttgcgcaggattgtctccttgaaagaccaacgctgcagccagttttgccagagcgtcagctggcgcatttttgcttcgtggcacatggatgacctcgatgtgttcaaacttgtccataagcctccgggccactgtgtaatatggcaccagttctggtttacgaacctcataaatattgttgatttgtctaataatgagctgagaatccccatgggctcttaagaaacgtacctccatagagagcgccaagagaagaccaaagatgagagcctcctattccgcctcgttgttagaacactcctccttgagaagagagaacgagtggtagatcacacctctttgtggagttttgaacaccaatcccgccccagctctccgtcgaggggtgccgtcggggttgacgtccttacgtgaggctccgtcgaagtaaagctcccactgttcctgaagctctgcggtgaaaatctcttcatccggtagattggtgatgagtggggagtcatctggcactggatgtgcagcaagaaattctgccaaggcttggcccttaattgctttctgcggcacaaaagtgatatcatattccatcatgagcagggccaatttacctagtcgcccagtgagcacaggctgacttagcacataccttatagagtccgcccttgcaatgagctggatctggtgcgccaacatgtagtgccttagtttcttcaatgcaaatatgagggctaaacataacttctcaattggggagtagttttgttcagcaccgaccatggtgcgacttaaatagtagcaagccacctcctttccttcatcattatgttgagcgaggagagcgcctatcgaggcaggctgcgttgcaatgtagagaataagggggctccctttaacaggagttgccagtactggaggattaagcaagtacctcttgatattatcgaagccattttggcattcttcatcccacacaaagggtgtgcccttctgcatgagctttgagaagggttggatccggcccgagaggttggaaatgaagcgtcggatgtacgccagcttcccttgtagtttcctcagatccttgagttctcgagggggcggcatgttaagtatcaccttgatcttctttggctcgatctcgatccctcgatgacggacgacgaagccgaggaagacaccggattggacggcaaaggcgcacttgagagggttcatcttaagttggtgtcgacgtagtcgctcaaagacaatgcgaaggtctttttgatgatgttcgcgatctttagtcttgactaccatgtcatcgacataacattccactgaatgatggattaaatcgtcgaggacgaactgcatggcacgctggtatgtggcaccggcgttcttcaacccgaacggcatgacagtgtagtagaagttccctttaggggttctaaacgccgtgtcgaaggcatcaaggggatccatcttgatctggttataacctgatgagccgtccatgaaggacagtgcgccataacccgttgttgaatagaccaccatctccgtgattggtaggggaaagtcgtctttaggacaagcacgattcaagtcgcgaaagtctacgcagactcgaacttgtccattcttcttttccacagggacgatgttggctaaccaccgaggatattgtatctccttgataaaacccacgttgatgagtcgatcgactttggcgatgacttggtcttggaactctggccttaagcgccttggtggttgcttcactggccgaaattggggatcaatcgccagcttatgggtggcgacacgagggtcaagtcctggcatctccttgtatgtccaagcgaagcaatctcggaattccatcaagaagcttcgatagtcttctcgctcttctttcgtcagcatgccactaacgaaaatagggcatggatcatccttagttcctaaattcatctccaccaactcgtcaatggttggttggccaccgtcatcaagttgtttaagagcccctgcaacatcgagctcctcttctaccccaacagctgcaacctcaaaggggtgttgttggagtaaagcatcacctattgtagtggtacttatggtgcaacaatgaaatatatcgtcttcaaatacttcatcttcatcatcgggttcatctacgttgatatagccgagaccgtactttggttgttctttacatctcctcttgataaactcttccgcttgtgcccaccagtcctcacatactgctggaggtggtggcaacctgttgtttcgctgtaggttgatgcccgccttctccaataggcgagccattctaggctcagccttcatggtcgtgcacgcttcttctgtatcagaataaggcttagggaattcgattatagaatcacactcttgtacctgtgggaccttgtagagaatggtccgggatgtagaagaagatggatctggaattgcccatacctctaacggggtagaaactaaagtgtagagggctgggggctgcatgcactgagcacccgcttttaccttctctatctctgcaactctcttcttgaccactccttgttgtgcaagcgcggcttccttgcttggactccgtcttgcctgtaaggtgatggtagttggcacatcgctgttgcttttgggcggtttcttgcttcctcgagaggttgcccccaaggtgatcggtgttgaggtagagcgtcttgctttgagcaatattggtgtagtagatggggcagacgtgctggtttcagcgggaaatggaagcttggtgctgaggttggttgctgaagaagaatttccccgcctactattcttgcgattccttgatgaagattcgctaatgattggggagcatggcataatgaggcgtctcaccttaggggttgtctcggtgccgggttcaataatgatgtcggctgccggtgctgttcgcccaagttgttgcttgttttcttcaacagggaagtaatacttggcgtcggcatggtatgattcttgaatagtgtatggtgagaagttgccaatgatgcactgttgcactccattgccgtcaaggaattttaggcattgatggagagtagacggcacgacacggtacttgtgaatccacggtcgtcccaagagagcagagtatgatgtgttggcttcaataacaaagaaccgcaccttgaagctgaatgtagacatttggatcttgatagtaatggcacctaatgttggcttgccctggttgtcaaagccacagatcaccacgtctgttggctccaagtcttttgttgtgaaacctgctcgagttagacttcgaacgggtagaatgttcacagcagatcctgggtcaatgagaatccgtcgaagatgagcagaaccaatgtttccttcaatgtagaggggacgattgtgatcgcccccttcgatgatgttatctttgtcgaaacatgaattcggcaataataaaagggggtagcgcacgagacctaaaagtggatggatgcagagacaaaggatttagacaggttcaggccctctcgatgagaggtaataccctactcctgtttggggatttgaatccgccgagtgtgtattgatctaacgatcaggttgtctcatgcccctagaggggctccctgccctccttatataggttgggggcagggttacaagatagaaaccttaaccaatacggtatcggtttcctaaatctactttacaatcttatcaaaccaggactttaggccgttccataatatacagggaaacgtaatacccaagtcatgatctgttacatatttcatatatataagttatcccctataactagtcggataaccatgccgtgtgggtatggggtacccataatctccacagtagcccctgagaccttcacagtcgaaaatataatcttctctcgaactagattactccaaagccgagtgcttcaatcatcttcgccatggtctcccgggtacttttaccaaatttgaagactgtggagggctgaaaaataaagtcaggtgcatcgaatagatgcacctaataggtgtagcccccaactatgtggttaattgaaccaaccaaacatatagtcaaggaataaataatctaaccaaccgagtggttttgataattgtaatcaaccaagtgacttgacatcaacatatagcatatgcggtgtgaatccccgaataatatgatccaagtgatataccgactgcttggcaaaatataatgcgtacaacctaaagttgataacatttttgaaagttcacatagcaaaacaactataaagaagcttgaatgctgtgaataaagaaatttccaaagtattgggcatacgccatgcgcacactgctttaacagatgtgcttaagtccctaaaagacacatggtttcaccacacccggaaatatatggcatatgtggtgtaaaatccgagtaaataaactcataaaggatttaccaaccgcctggaaaatgaccataatatataatcagcctaagccataatattggtcaataaaaatacacacttacgtggcaaaaagcaatgatattgtatccaatcaattgcttaaaaacccaaacagcaccttgacttatataaaaaagtcagcgggacagctatataaagctttactgtttgacaccttttaagatgcattgtaccaactcctaaaaagttgagtaactgcggtataaaaggattttaaggtattgggcacttgatcacgcgcactttggcctaagcaaaaagtgcctaagtccctaaaagaacgtgacaggccacacctgaaaatatgggctgcagacatattaggcctaggccaaaaaatatgccttcgacaccctttaaaggatgacgcatataacatgctcccgagtaataaatcttccgggtaatatagaccaagcgtaactcatatgaatagcttctgatctgagtgattatcccttatgggatactccaaaatggatgtaacaattgaatcccgactggcgcaagtattcagttgataacccttacggggaataataaatagtccagtctttgagcatataaaatagacccatgatcatgaattcatgttgcatgtatccggagcaagtccaaattgaagatataatacttgtgtttgaactagtaagcccctgagcatatagcttgtccttctgtcgtagtcacaattgtccattgatggtagctgacgcagttggcatagagacaagacgaccaacatagagataatattgcccaccagaggtggcaaaaatattggtagtagtgaagatagtgattccaatcaaaagtgataaagttgcatagccgtggaggcgaagaaaccagttggcaacagtcaggtcagccagcaatgaatatgaaggcgcccagcaataaagttgtgtagccatggcagtgaaataatcagtcggtgacagacgatgcagctggtgaagaagatgaagatgcccattagtggcgacataataagccatccatgaaggcgaggataccggtcggtggtgacaaaagcaagccgacggtgaagatgtagacacgcatcaaaggtgatgacgaaatccaccaatcatgaagataaagaaaatagtcggcgacgacaaacgcaaccgacagtaatgatgataagcagcaatcatagatgatcaaatataatgacgaagttgcccatcaatagcagtagagtgggctatgttgaagaggcttgacaggatgttgatgaagataacaatgtcggtgatccagtcaatagcaaccgtgaaagtgaaataataagtcggcgaagacatagtcatccattagcaacagagttgatgtcagggccgatgaagcagaggtgctggtgatgatgtcagtgacaataatccatcaaattggtgttatagctgttgcagatgcttcacttggaggaaagtagatgatgttgtccatcttgtcgaaactgaggtgattggttgataactctgctctaaagcaaagacgaagataatgactcctggaattgactcgttggctgattaattgattgcttcagcttgtcgaattttaagagtcttgtatttgtgtagcccccgactctttggttagttgggaaacaactgaacatagagtcgagaactgtagcttcttgtcgtcgaatagtcattgcttgattgaagatatgtgttgaagatgtccaagtagaaatcatgaatgttggagagccacttgttgtagtaaaataacacgacattgcatgccgagatgttgaggttcacaaagacgtcgtggttggtgaagtagcaaaacttgcgaagtagcagcaatagagtttgccggtgccgaagataataaatatgaagtcgctctaccatgatgacaaagttgcatcgccgtgatgaagtgaacacgagtcggcggcaacagaagcaaactggtagtgaagacgcgcagttgtgaagataaaagcaccagtcgacggcggcataacacgagtcggcggcagaaaacgatgatgtccatcagtagtggtagctgtataaaccagacgtagaggcgagggcactagtcaacagcagacgagatgaccggcggtgaagaagataaggctaatcaacactggtagaatcatgtagccatggaagtgaagaaaccagtcggcagccatggcaaacgtaggcagcttgtgttgaagatactgatgcctattagtagtgacagcgatgtagccagccgtgaagaagatagcatcagttggcgttataacaggccagccgtgcaggcggtgacaccagtcagcggcggatgcggtggccggtcggtgaagacgtagacgcccaccaacggcagcataataggccagccgtgcaggcggaaacaccagtcggaggcggcgaaggcaagccggtcggtgaagacgtagacgcccaacaacggcggcataataggccagccgtgcaggcggaaacaccagtcggcggcggacgaggcggccggtcggtgaagacgtagacgcccaacaacggcggcataataggccagccgtgctggcggaaacaccagtcggcggcggcgaaggcaagccggtcggtgaagacgtggacgcccaacaacagcggtcataaaggccagccgtgcaggcggaaacaccagtcggcggcggcaaaggcaagccggtcggtgaagacgtagacgcccaacaacagcggcataaaggccagccgtgcaggcgaaaacaccagtcggcggcggacgaggcggccggtcggtgaagacgtagacgcccaacaacggcggcataataggccagccgtgcaggcggaaacaccagtcggcggcggacgaggcggccggtcggtgaagacgtagacgcccaacaacggcggcataaaggccagccgtgcaggcggaaacaccagtcggtggcggcgaaggcaagccggtcggtgaagacgtagacgcccaacaacggcggcataaaggccagcagtgcaggcggaaacaccagtcggcggtggcgaaggcaagccggtcggtgaagacgtagacgcccaacaacagcggcataaaggccagccgtgcaggcgaaaacaccagtcggcggcggacgaggcggccggtcggtgaagacgtagacgcccaacaacggcggcataataggccagccgtgctggcggaaacaccagtcggcggcggcgaaggcaagccggtcggtgaagacgtggacgcccaacaacagcggcataaaggccagccgtgcaggcgaaaacaccagtcggcggcggcgaaggcaagccggtcggtgaagacgtagacgcccaacaacggcggcataaaaggccagccgtgcaggcggaaacaccagtcggcggcggacgaggcggccggtcggtgaagacgtagacgcccaacaacggcggcataataggccagccgtgctggcggaaacaccagtcggcggcggcgaaggcaagccggtcggtgaagacgtggacgcccaacaacagcggtcataaaggccagccgtgcaggcggaaacaccagtcggcggcggcaaaggcaagccggtcggtgaagacgtagacgcccaacaacagcggcataaaggccagccgtgcaggcgaaaacaccagtcggcggcggacgaggcggccggtcggtgaagacgtagacgcccaacaacggcggcataataggccagccgtgcaggcggaaacaccagtcggcggcggacgaggcggccggtcggtgaagacgtagacgcccaacaacggcggcataaaggccagccgtgcaggcggaaacaccagtcggtggcggcgaaggcaagccggtcggtgaagacgtagacgcccaacaacggcggcataaaggccagccgtgcaggcggaaacaccagtcggcggcggcgaaggcaagccggtcggtgaagacgtagacgcccaacaacagcggcataaaggccagccgtgcaggcgaaaacaccagtcggcggcggacgaggcggccggtcggtgaagacgtagacgcccaacaacggcagcataataggccagccgtgctggcggaaacaccagtcggcggcggcgaaggcaagccggtcggtgaagacgtggacgcccaacaacagcggcataaaggccagccgtgcaggcggaaacaccagtcggcggcggcgaaggcaagccggtcggtgaagacgtagacgcccaacaacggcggcataaaaggccagccgtgcaggcggaaacaccaacaacggcggcataataggccaaccgtgcaggcggaaacaccagtcggcggcggcgaaggcaagccggtcggtgaagacgtagacgcccaacaacagcggcataaaggccagccgtgcaggcgaaaacaccagtcggcggcggacgaggcggccggtcggtgaagacgtagacgcccaacaacggcggcataataggacagccgtgctagcggaaacaccagtcggcggcggcgaaggcaagccggtcggtgaagacgtggacgcccaacaacagcggcataaaggccagccgtgcaggcggaaacaccagtcggcggcggcgaaggcaagccggtcggtgaagacgtagacgcccaacaacggcggcataaaaggccagccgtgcaggcggaaacaccagtcggtggcggcgaaggcaagccggtcggtgaagacgtagacgcccaacaacggcggcataataggccaaccgtgcaggcgaaaacaccagtcggcggcggacgaggcggccggtggtgatgttctgactgatccattcctagagcgtaagagataagcttaaagccatgaatcccttttatgcatatctggatctggatcctgcagaacaaacataaacatataggatgagtagtatctgatataaatataatactcgagaaaaaatcaagtattttaaaatatttataaatatgtatttctcctcttgtcaattttgatttccccgagcagatgactcattacgtttaaacgctctgcccaactagtcatagccaccaagcactgggagtcggcctaagcacttcccaaacatacatatgagtgacatgagttcgtcattaatggaacaaagtttcacggatcggagtttactactcgggtacttttgcaattattaagagcagaaaataaatttatctcatctctatgcttttgatttattccgaataatacttagcaccttgcgttactcggtccatccaacgagcccccgggtgctaggaatcggcccaaaggcaaccatccattggcaaaccaaacggaaagcataggaagatagaactccataactcgataggtacttttgtactcagattatgtcgcaagcaatcaagataaatattataaaaaatatgatataacatctgtagcccccgactcactactcaatggaagaccaattggtgtagtgaggcagaggaaaaggaaaaatatcatataaagaataaaataaatgatgacttagctttgtaatattccccttggtgatggcggaagtggccaatgtgggaacaaagtcgtccatcaataacaatgaagacaccagtcggcggcgacgaaggcggtcgacggtgaaagcgaagatgcccactaatggcggcataataggtcagccgtgtaagcggaaacaccagtcgacggcagcgaaggtgagccaacagtgaggatgtagacatccaacaacggcggcataataggccagccgtgtaggcggaggcaccactcggcggcgacggaggcaagccggcggtgaagtcgtagacgcccaacagcggcggcataataggccagccgtgtaggcggaggcaccaatcggcggcgacggaggcaggccggtggtgaagtcgtagacgcccaacagcggcggcataataggccagccgtgtaggcggaggcaccactcggcggcgacggaggcaggccggcggtgaagtcgtagacgcccaacagcggcggcataataggccagccgtgtaggcggaggcaccactcggcggcgacggaggcaggccggcggtgaagtcgtagacgcccaacagcggcggcataataggccagccgtgtaggcggaggcaccactcggcggcgacggaggcaggccggcggtgaagtcgtagacgcccaacagcggcggcataataggccagccgtgtaggcggaggcaccactcggcggcgacggaggcaggccggcggtgaagtcgtagacgcccaacagcggcggcataataggccagccgtgtaggcgaggacaccagtcggcggcgacggaggcaggccggcggtgaagtcgtagacgcccaacagcggcggcataataggccagccgtgtaggcggaggcaccactcggcggcgacggaggcaggccggcggtgaagtcgtagacgcccaacagcggcggcataataggccagccgtgtaggcgaggacaccagtcggcggcgacggaggcaggccggcggtgaagtcgtagacgcccaacagcggcggcataataggccaaccgtgtaggcggaggcaccactcggcggcgacggaggcaggccggcggtgaagtcgtagacgcccaacagcggcggcataataggccagccgtgtaggcggaggcaccactcggcggcgacggaggcaggccggcggtgaagtcgtagacgcccaacagcggcggcataataggccagccgtgtaggcggaggcaccactcggcggcgacggaggcaggccggcggtgaagtcgtagacgcccaacagcggcggcataataggccagctgtgtaggcggaggcaccactcggcggcaacggaggcaggccggcggtgtagatgatgatgcccatcaacggtggtgtgaccaaccgaccgtataggcggggacaccagtcggcggcgacggaggcaggccggtggtgtagatgacgatgcccatcaacggtggtgtgaccaaccgaccgtataggcgaggacaccagtcggcggcgacggaggcaggccggtggtgaagtcgtagacgcccaacagcggcggcataataggccagccgtgcaggcggaaacaccagtcggcggcggcgaaggccagccggtcggtgaagacatggacgcccatgaacggtggtgtgaccgaccaaccgtataggcgatgacaccagtcggcggcgacggaggcaggccggcggtgaagtcgttgttgctatcagcaatggcggtggcgaggacaagccggcggagtggactcgcggccgatcgaccggaaagctgagacgcctcgagtccatgaccagcatcaatcgcctcaatagtgccgcgtagttatatgcgaacaacaacaaaaaatagcaagaaattaatctgagattaaaaatcaatatgataaataatgataaaaatcagattgagtttccccctgactgatttggatcaagtcagagaagaggagcttgaagaagtggtcgacggaaaggaagtgaaaactcccaaagcgaaagcgaagtcggcgactcatgaaattgattccatcgcgctcgttgataggaaactcgacgcaacccttacctggcgcgccaactgtcgaaacatgaattcggcaataataaaagggggtagcgcacgagacctaaaagtggatggatgcagagacaaaggatttagacaggttcaggccctctcgatgagaggtaataccctactcctgtttggggatttgaatccgccgagtgtgtattgatctgacgatcaggttgtctcatgcccctagaggggctccctgccctccttatataggttgggggcagggttacaagatagaaaccttaaccaatacggtatcggtttcctaaatctactttacaatcttatcaaaccaggactttaggccgttccataatatacagggaaacgtaatacccaagtcatgatctgttacatatttcatatatataagttatcccctataactagtcggataaccatgccgtgtgggtatggggtacccataatctccacaatcttcatcagcgaaggtaatctcattcacaaacaaggggttgtcgtagagtcgatgcttagccatatcaacttcgtaaacttctggagcctgcaacgcctttataagagcttcgcgcagatcaggcaccatcataagagcatcatagacactcaatagtgctgggatccgtttgagatgcgcaagaacgttgtagtcgacagcaggcttctctttgcttccagtttttgtttctggagcttctccaggaggagaggcctccttggtaggcttgtctacatttggagctttggactagtggggatccggcaaggtcttcccccctcgcaggcttatgttgacctcttctaccttcgtcttctctggatccaactcagcatggaatatttctcgctcccttcccgtaaacgtttcatcggaaccggtacttgtggagtcattgtaggtgaggatgacattgcatggagcaatgtttggagtcggggtggaattgtccacctccatagcctcccttgtgcttattgaggattgctcccaacccttgggcagaaattgcgccaaagtaggtagctcacgaccccagcggggaaaagacttgtctccctctgagaaggggacaaatcgaggtggaggacgtcgctgacttgggtctagccatcttcttgaagttgggtgagtatgcggtgacaacttcatttgtgggcgacggggtggaaagctcaatggttgaggcttccgttgcacaacactccatggtcggttgttgtcgccatggctagcctccacatgagtggcgggtgctttcgtcagtattatttttgcaatttggtcttcaacttgggctagcggcgcccatgatgttgcacgcctaccttctctttgtttttgagggaaaggctcaacggacaccatattgacggcatggtagtctgggttgatggcgtctgcatcaagattgattcttttctcgttgactgccctttggagccattctttgaaggcgatgcaatcttcaatagcatggccgacatacctatgataaggacaatataatggattgtcagtcatggttacctggtcaggtctccgtggtttaggcagattcaaggcgcggtgttccatcaactggttgaacatatctttcaccaactcccggcggaagatatactgctttttgagaagatcttgaagcgtggagcgttgcctgcaatcatgggcacctatccttgaggtgcggtggagaagacttttgtggaattagcttcggttggaactttgggtttgttcccactaccactaggctttgttgcgttaaagcgtttggtagggtcaaaggcgcttgcattcttgtaaagctccattatctggggtgacttctcaaactcgagcttggttgctgccacggcggaactgagtgcgctaaatgtttttggttcacgtgagacacttcaagagaccgatgttgttgcatcccatgaacgcacatctcgattgcgtcttcaagatgcatctcccttgcgagacgcacgaagctattccggaagcggatgacatagtcgtcgatggcttcatctctccattgtcgaacttgtgatagttcaacaatagagaaatctttcttcatagcaacaaagtgcttcttgaatacttccttcatggttgcccagtttccaatggatcccatgggaaggcgactgtaccagtggaaggctggcctagtcaaggaccccgagaagtgacggaggaggagagaggggttgttggcagtgtcgccgcatgcagcttcaaagtacgcaagatgttctcttgcatctccggttccattgaattgacggaacttgggtgggtgccaccctgccaggaaaggtactaaatcatgccaagcttcatatggcttctcaagctcactctccattggtcggggtgtttgctcgatggagatttgcttcagccgcttgttcaccaggtcttcaaccatgtcatgatagtctttcaatgtggtgggaagtggagcagaggcaataggaatgttaaggaatcgagggcgaacgcttgacgtcgaccatcgctgaacatcatgggtttgcgttgggtgatgtgccatggcttccacttcttcaatctgtggatcctcgatgaccagagcatcatggttttggttctggtttggatcaggtcccgtcatgatatcaatgaagcgatcaagctttgctgctaattggtctaccacttgtctttgttcttggacttgttcctctaaacttagaggttgtcttgatgtacttgctatgttcccaatggacagattctcaccacgtggagcgtgttgtctagcatgttgcctaggatcgccttctgctgtcacatgggcaggtgcattatcaaagttattaggataaccttctccgtctgaaggcagagatgggttgagttcattatagcgagggagatcgagattcacttccagcgatgatgatgaggtagactctaactcatcaagatcttcaacttcaacatgatcttccaggtcttttcttgcttgagaaggagttgtctcaacattcttgatagcgatagccttcatgcgagtgttagcaccaggtcgacttgcaacctgaagtagctcgctttggtcatggggtaggcgtgtcgtaatgtcgatgtagcgacgaggggagacatctgactagagtgctttgcccctattagataatgatccttctcctgtaccgataggaagacaaggggccgaagctctagttgcttcttgagaggaagatgtgcttcgtcttgaaccctccgagctgaatcgtgggtggacttgatccaactgagggaggaacgtcttggaaaaatttgcccttggatttggcacgatctcttcatcagaagggtaggtgaagtcgtgagtaatcggcgggggaacccatgcggcattgggcttggtttcgtggtgtgcggctagtgcgctgcacatgacaatgctttcctttggatcttctatgttcttgcttcctgccacctgttcaactctagctggaggcacagaggatgattcctgctgaggtagaacatcaaccatagggttaatgacagcttcttcttgttgagacgccttgtcgacttgctctactggtgtctgctcgactccctccatcggagtagattggttctccttggactgtcttactaatgttgatggcgacgtgcccaaggtagcttaaacttgccccttccctcattgcaggatggttatggggcgaggttgagttaacgcctgctccctattcttgtcagcaacgtcttgtgttctccggggttttggagttagacgagctataaggtagttataccttgcatccctctccaaactgggagagatacggaacacgatcctttcatcttcttgatgcacttctctatctggacgaacacgaacttgagtgtgttttagcactaggtcttcaagctctctgtagagagcgtagcggttgttacgacgtcgctctcgcttgcgttgattctcagtagatgcatgctgacgtcttggcggaattgacggcgtcgggagaagaagtggtgccacctgccgtgtagctgtggtaggtgcgttggtttcatgtcgcctttgtgtatagacctctcgtcttggagaagatggaacatgaggcggcacttgagaagatggagcttctcgaactcgccattcttgagcgggacgtgaagatgtgggataatcttggcgtcttgaccaccggttccagcgtggaggcaacgctgtttgtctctggtgcatcacttgagttgatggaagcgtacgtcgaggagccagcgtgcggcgatcatgttgaggacgataacttggctggtatcgtcttgatcttccccaagcttgtgttgatgatgatcgtggtgcttcatgatcctggagtcgtcttccaagttgggccattcggtcttgcagctcatgaagttcttgtcgtaagtcttcgcctcgaggagcgggtgcctcagaccgcaggacagcgaacctattgttgttgtagtcagacgaccctcctaccgcagataggtggaggcatgactcccacgtgctctgctggcgaggggtgtacgtgttgtagtcgaaggagatagttgagcctggaaggacgaggtgctccctatcacgccgcttccaatactccttcatgatggctcgtctgactttctccttgatcttagttggctcacatgcccattcgtcagggaacaagtcgtaaggtggctctagaatgcttgagaacttgaacaccttcttgatgaggacagatgtgtcaagagaccagtcttcctctgggacggagctctgggcgatgcgcgagctaacgagttggtgtagacgctgcaccttgcgatacttcctcctgtagttgcgcaggggatgaggactgtttgcccgtcgagcatgcaaaatgtgtcgacgaagattgtcggagacagcttctagaggctcaagcagctccacttctgtgtgttgcacagttggggtaggcagctttggagtagcggctggatcaggggcacgcagggatgcagtacttgagcgcctgttggaagctttgacacgcagcttctgtgcagcttggatgtctcccttaatctcagctacaacggactccttcaagagggtccgggcttcaagcatgagggttcgccgctccttcttcgccttggcagaagcacgcttgcgttgcttcttagactgggcctcctggaattgggtcacatcttgagcttgttgcatgtagaccttggagccatactcgaagaatgtcaccagtggtagtgatccaaactgaatcacaaagggcgtcggggtgttctcgatgatggaaagtcctcctgcaagaaggagccttggtcaggtacactccacgttgaagatcatcatgcaacatgttggtgttggttggatgaacggcgaagacgagcttgacgaccacagcatagcgaagatgggaggagaaccaggtcccactgggcgtgccaatttgtttagggtggaaaataacatctgagatctcgtttgtttagagatacatatatgtgcgggcgtgccagtgtacctaaatacacaatgtaaacaaaacatagggaacatgctctttattaatcttaaaagatcataaatacaaattcccaatgtaatatatatgtatgcgcgctccataatctgtcattggacaaatctgacttgtgcgatgtggtctcctggtttctggggccttgagaagctcccagttaattacctccgcaggtctaggcctgcaagagaacctccgattaagctgcttgtggtcgtctcgtcgtcttcgcttcgcgttctccatgcatggttgtgatgatgatgtagatgtgtgtgtgtgtgtgagcgccggcagcgatccatggcctcgtcggtccgtgcgccggtgttggtcgcccaccctccgtcgtctagcctcgtcggtcttgaacaacgtgtcgatgtagattgttggtgaagacatgcatggagttgcgtagcttgaacgacttgacgtcacagcagttgcgtcgagattagattagagaagaatcagggaggaattattgaagatggttgatgtagacggcggccggatttaatcaaagctcggcatctcatttgggacaaataagaaaaaccaacaggacttcttcagcccacgcattggtttgtgcatggcactgtagcagcaatgacatgtcgtcctccgattggttggccacgttgccacaataataaacttaatcaacatgcattagctagcttgttgccatccaacagcactggctcgctgtcctcccgtcgtccttcctctgtactgcagccatacttgcctccatcgtcatccgctggtttcgacgccatgcgtgatgcttgacctccggcatgagaactgatagaagtcttggcagtcagcggcagctccggcgatcctcggtgcgctccggcagggcggcttcccgacgacctcctccatggttagcccgctccagtgcggtgaagcttgcaaatcaaggatgtctagtatctcggcaaggtcacagcttcgggtagatgcatcaccagcggcttgaattagcagtgtcgagtccagggacaagtagcactgcgtcggcttgaacagacaccggcatcgatgaggcttctgtgacgcgtagatgaatcggccaccgcgacttccccggcgacaatgatacgtgcagatggatccctatgcatggatgtgtgcgtgctgtagatgaaagaaaacgaaacaatcttgctagcttttacctggactagccatcaagctcatctcctgcgcttgctgatgatcggatcaccgcgtgtgccctctcctgccggacgccgggactccggccgaagtcgcttgccgccgccggtgcgtgtcgtcgatggatggatcgccgatgagaattgatggatggatcgccgatgagagttgatggatggatgtgttgatgctggatgggtagatgcgttgatgatgggtggcttgtggatgctagatgtgttggtgaatgaatgtgtggatgagttcgtcaatgcccctggctgccgaggggtcgacgccttatataggggtctggggtcggtgctcgccgcgtccgcgcgccgtttcctccgcgtcaagttcgttgcagataaggcttgatcgatcaatttgttatttgttcatatccttctttgattttatctcttagcttctcctggcgtcaaatatctgatttgtaattcgctttgtttctctgctgctgggccacagttcggtgataagcgcctcgccagcgctcgcgcgaagtaactaactagatcaagtttgttatagagataaaatcaatttgtttgttggttatctcttaattcatctggttttatctcttccgcatattaacttctgaaatcttggcgcgtaggcagctaccgtcttcggccatgggccgagcccatgattaatcacttggatatgcatagattgcttaatcacccaggcatgcacacacatacgaccgtctactgtagtacatgcatgcatgcacgtgattgcctcaccagccaatcttcacacggctagttattggttaattatacatgcacatatactaatccaagtatatatattcccagctgcctgtgcatgcatgtatttgcgtgtatatacatggccgagctttgcgtagaaatgataagttagccaacttacaaactgcttgtttgttttgtccatcatgagtaagtcttgtgtacacatataatcgccaaaataccatcaaacaataacatgtgtaaaatgttacctctgacacacaaaacccaataactctaacactaacatttttcttaaattttatatagaggttttctctttttctctctcatctcctctcctccacccatcatttgatcttaagtgacatattggggtttctgtttagatgcccataatagctaacaacttgttattacctagatgtctaatattttctcaggttttatcgttactctctcaatatatatatttataaaaaaaataaagacataactcaatatgatagtatataactttgatgcatccgattgtttttaagtttacgtatagccacgcgccttaaaactactgtacaacatcccaatattgatatttagggctcctgtattgggatgttgtacaacatccaaacgtaactttgtgtaatttctcctttttaatatatacactgtggggccttcctcatagtattttagtaacataaactttgtgtaattcatgtggatttgtttccaataatattcaaaactttatgtgttttttccctattattgtgtatttaaattctcacatttcaaaagaaccctcatccaatacctcataatataagggattttgagggattttgatctaggatatgtcacatccactcaaaatcacatccactcaaaatcctttatattatgtgacaaagggagtatatatattgtagaggatgagaaggggagcattaactctcatataaatcataatatagtactccctccgtttcaaaatgtttgataccgttgactttttagcacattttgaccgtttgtcttattaaaaaaatttgtgaaatatgtacaactatatgtgtacatgaaagtatatttaacaatgaatcaaataatatgaaaagaataaataattatttaaattatttgaataagacgaatgatcaaacacgtactaaaaaagtcaacggtgtcatttgaaacggagggagtagtagtgaccatattattgaggaaccatgacaatcgtgttaaggtctttgataagtatcatcacgaattattcttttagtggtagacgatgtactcatcgatagcaagacgctttgggataactttatcaattccaaaatatatgtctttcaaagaacgagtgggtcgcatgcgtttgtacggtgtttcttaaaaaaaataaaaaaggtagatgcaggcaataattacacacatcacatgggtgggggtttgcaaggttagtcatatgtaagccagacaagagtgtgcaagccagacaagggtgtgtttagctcacgctaaaattgaaagtttagttaaaattgaaacgatgtgatagaaaaattgaaagtttatgtgtgtaagaaagttttgatgtgtgatagaaaagttggaagtttaaagaagattcggttgtgtttagtttatactgaagtttggaagtttggttgaaattgatacgacatgatagaaaagttgtgtgtataaaaggtttgatgtgatagaaagttaaaagtttgaaaaaaaaaatttacaactaaacagggccgaagtttggaactaaactcggcccaaatatgcagcagacggctctgctctgcgctgctgcggctggctcacatgcggccaagtatgcatacgaacggaatagagagaccttatccaggcaaagtgaaatgaggctcacgaggaggcataggccatctggtctgggtctggtcggtcgtcttccactccatccgatcgaccaaccagccgatgggttctcgcggctgcttctgcaagcgacccgcggccatgggcaatcttcttcttcttcttccccacccggccaaggccaaattgaggcctcccaccacggcggcgaagcgcggtacactcttcttctgcagcctcagcaccgatggtccgtcgtcgacgatgaccgtctccatcactggcgccaccggtttcgttggccgcagattggtccaaaagcttctctccggtacatacatcttgcagtactactgccactcttctgccagtagtagtagcagcaatgcgatttcatttctttcactaagctatagctatagctagtgtacgtgtttatatctacagaagatcacaaggtttgcgtcttaacgcggtccgccagcaaggccacatcagtttttccgggtaagaacaggtaatactatagagaaagatttactacatttacgaatgcactgtaacagttgatttattccttcctaatattgctaattagtgattaatacatatctatgataatctcagtctagctgtatatgtttcaattttacttttggaccacatatattatatttagttatgtcgaattaatgaagtctaatatatgtgcgtgcgtacgtgcgtacgcctgtatacatactgcagcttccacatttccaggaattacaatagccgagcagggagactgggataagtgcatccaaggctccactgctgttgttaacttggcaggcatgcccataagcacaaggtggtcacctgaggtaattgtaattcctacctacactattacattacatataattaagagcaaaattcacgtaactaaatatattatgatcaaaccatggcaaaactacagatttaagatgttgtatcacaaaactacatatttagagataaatttaacacgaaactatagatttaaggtcaagtatcacaaaactataaattttatactgaaggtatcacaaaaatacagattttatattgaagttattacaaaattaatataaattccaaagtataaatccctaggactaatcgtatgttagagctataaacgttgtagttttgggatgaattacccctagacatgtagttttgtgataaatttgctacttaatctttatttttaatactccatcctaaatatgagaaattttacattaaatttgtagttttgagatagtttgatcaagaatttatagttttatgaaatttgccctataattaattaagagctaccacacttttaattacgcctttaatttcaaaatagagtaaattgcattgctggtacacgaacttgtctggtgggtgcaatctagtgcacgaacttgtaaaatgctcgttttggtgcatgaacttgtctagtgcgtgcggaggaaggcataaaggacacaacatggctaatcttattaatttaggggctcattaggatactatgtaaacatatatctgagaaggtttgctattagacatacacctcttcaataaaaatataatggatatagtgatcgtagaaaaagataaaaaaaaacccaacaatgatataagggttagaaatatatgaaattcatcacttccatgatgaaggataaagtagagaccacatttataaatattgcatgtcttatatacactcactacacgtatgcatgtcacatcctaatcaacatcagcttcgtaaaattaacattgccaggctattttggtcctctttcgcacgaactagacaagttcgtgtatcgaaacaagcatttcacaagtttatatactaagttgcacccatctaacaagtttgtgtactaccaatgcaatgtactcttcaaaatataaggcacaattatttttcagaaaaactactctgcagtatcccatggaaatggaataagtggataacgattccatcttatctattccccttctctctctctgagccttcgtcttcctccgtctctcttatttcgctcctcttttccccctctcctcctctctgctgcaaagagcttctctatacaggcatggcggcaacaaagcaggcccctgataacggatctagaggcataggtccttctcactgttaaatctaccccgagtgtagatacctaccatgtatggtacctgtggtatcacgactgatacccatgtatcagacacggtacctgtaggtaacgtgtttagtacctgtggtatcacgactgatacccatgtatcagacacgaggcttggtataggtatcaggtatcgtggctagctgcgaggtatcaaatatcaatcacaacacgttttctctcctcttctcgcttctcctaggctcgacccttctcctaatgctgcgacaaccagcgtcactatctacgtgaacgtgtcgagtgggggcgagatgactagactctcggggagaaagcatgcacgtgggatgacgtcatcctccataaagtgtcccgtttgaacggaatcccgttctctagcagccctcttatgtttttcatatattttggcgtacatgcatatgcatgcaattagctagcacctcgtttccactaaattattattttttaaatccttgacactcaagatgtttaggttgtgtttagttcacactgaagtttggaagtttggttgaaattggtacgacgtgatagaaaaagttgtgtgtatgaaaggtttgatgtaatgaaaagttggaagtttggaaaaaaaactttggaactaaacatggccttaattctatggatgcatgtattgtatttattagagtgatccaaacatagagacggtaataaatgtttcttgctttttgagttaaaagggtcgttgtaccacgtattttgaaatgaatggagtattaattaaaaccatgatttgaaaatcagtggaattattgtcatcgaccaaacaaacaattaattaatggtcgatatatatatttgtatggttttcagattaagaaggaaatcaaggaaagccgaatcaacgttacatcaaaagtaagtacggagcctaaatgcccttaattaatgccaaaccatgatttgtgagtttttctacagaacagtcctggggatttggtaccacacacatccaggctcttttccaaggacaatactgtataatttgatgtttgcattgctgaaggtggtgaattacataaataatgccagtggtgatgctcggccctcagttttcgtgagcgcaacagccattggcttctatggtgagtagtatatgcacctccaggtcgatcgataccatcagctggtttagattcaatttgctggccatggagaattttgagccttggaatgcatatgcaggtaccagtgagatcagtagcttcgatgagtcaagtccgtcaggcaatgactatctagcagaggtaagagtaagatggacatcgataccatgaatgaatgcatgatcgatgtgtgaacctgtcaggcaatgactaatctttgcattgcatttacaggtgtgtcgagagtgggaggccagggcatgccaagtaaaccaagaggatgttaggcttgtgcttcttcggattggggttgttctcggcaaggacggcggcgctctaggtacaaatatatactgcttactaatttgctttgctatctgcttgctcttccttcaattatcagatcgttccatccaattatatcattttttttgttgagatgatttctgttcactcatctgatagaataatacgtacatacatacatgtatgcagccaagatgattcccctttttatgatgtttgccggcggccccctggggacgggacggcaatggtacgtacgacgatcagcgagcctaattagatcatataaacagctggttgactaataggcaacgtagaatctgaaaaattaggtttcaaggctttttagcttttaatttactagaaaaaatacccgtgcgttgcactgggtgaaagttattttaatcttattattattttatagtttagttaaggtgaaattcactgtaagaattagcttagatataggagtatattttttataaaatcatgagctataatgaagagcccgatcatctcaagttagcatgtgagttttcttaaagggatttcttatacgactacttttgtatttgcaaaatcgaacaaacttaaaactcgactcaaatacggatctgtatttccaaaagtgaacgaaccttaaaactgactcatacacagatgatgtaccaaagttccgttacatcttcaatttttataatagtagagactagaaaatcatgagctacaattaggagtccgatcatcttaagttagcatgcgagttttcttaaagggatttcttatacaactctttttgtgtctgcaaaatcgaacaaacttaaaacccgactcaaatatgaatatttatttccaaaaacgaaagaaccttaagctaactcatacacgaatgatgtaccaaatttccggcaacaacatcttcaatttttatagtagtagagatagagattttttggattctatagagcttgtaattctataagaaactgcaactactataaactcatcaaacaagccttataatagttgccaagtcgatttagtacatacatatatggaccttagctgaatatatgtgtcgattattccacaggttttcctggattcaccaggacgacctggtggacctcatctacgagtccctcaagaacccatcatataaaggtaactcctcatccaataggagtattatatatatatatctccatcagggaaagaacatgataaataatatactcatttcgtcctataatataagggattttgaagggatgtgacacatcctagctataaccatatatctagacatagctaggaacatatatctagacatgctcttgtctagatatatgtgttatatctctccaaaatcccttatattatgggacggatgaatatgttatattactccagaccaaattaaactaattaacgacatcggtcaaattaaattaggcgtgataaacggaaccgcacccaacccggttcggctgtcggagatgtgcgagcggctggggcgagtcgtcggccgcccctcctggctgccggtgccagaaatcgccctcaaagcggtgctcggagaaggtgcatcagtggtaatatagtaattactgtatttgttttccttccagctggcttaggccctgttcactttgatgcaatttttaacgaaaccaaattttggtaaagttataaaaaaagtggctacatatagtttgctgtcaaattttggtaactatataagaaatcttgccaaaaggttttttttggcatcaaagtgaacatgcccttggaatttggaataagatgcttgcttgcctgcctgcctgctctgcagcttggatcatgcatcagaattaagaatatatatgcatgcaatgcaggtcctggaagggcagaaggttcttcctgtgaaggccaagcaactgggcttctcctaccgatacccctatgtacaggatgcactccgggccattgccagggacctatgactgatcgactcagatgaatactcaaatcgatcgatccgccgtgcacgcacaacagtagatatcaaaattgaaatatattatatataccaaaagcaaactattattgttgttggcttgtattatctctgattaaactaggccatacgtttcattggatggcgtacgtctttccaccatttttagactgaagcaaatatatgcacgtgaatgaatgagtatatattttcttcgtgtcttgttcgttctcgagagtcgagacatgcagatcgagaattgaattgaatggcggccgcgaaggcgatgaagctgttgcaggttgccgcagcgcttgtgttggcctgcttggcgctgcaggcgaccacggcggcggcgcatttcacgctgggcgtgtccgacgatcactacacggaacgttcgcagttgacccccaggctccacagcgagcccctcttgcttcacctcatcgacaggttaattactacttctatatataccttttatctttttgcttccactttacatttacatcttccagtatatatattactccaaacgaaaccaatttaatttgcgtggtgtgtgcatgtgtgtgtgtatatatatatatatatgtcgtaaaacaaaagaatttcttgttatagctagctccgtaccgtatttatcttaattgttgcaggattaagtaccgacgtcccctccgacggagttaccgcgatgaacaaccaaacacttaatgggaggaagaagatgaacaagagatgggaggagacaaaggaacgatgtcttgttcgttggatgctctgttcgcttgccggagcccgatgcatgattactcccatatatatatatcatcgttccatcactacataagcctttcttttttaaagcctcgattgttcttaaaaaaaagcctcgatcaatgccacgctgcatctggcatagtggcctgggcccaaatctatataaaaaagaagaccatcgataaggtacataatatgcaggtaatgtaccaactgtatacgcgcgcgtgcgccggcacatgtaaggtatgtataactaaaaaaaatatgtgggcatatgtttacttttttaagaagataaggtggctattccgcgccatcaacgttgcatagatagattgccactagactttgtaagttttgctgtgttaacgttatgtgtgtgtttccttcgttatttcttactagcaaaatacccgtgcgttacaccgggtattggtggggtcgctgaagtttgatattaacaatttatcaaaagcacatgacatgataataatcatcggcgatatgtaaaatgataaagaaataatttattttatatttgcacgatgtgaatgactcgtctgacgcgattgggcctgatggtcatggcaagggggcgaacaattaatgcgtctccttttgcatagaaggcgactgatggaaagttaagtgataaatagaaaaataaatattttttaagtacataagcttaacgaaaaatgaatggaattgacctaagggcacatctgaattcacgacataatgtaaatgtgggatatattcgattttccaagtattgtacttgtgatatggaatatctgattcatgaaaatggatgtcattattttttgggaaaagtgtgaattacacctctgaactattgggtgattacgaattaccccttaacaaatatatttcaccctcaactatcataccagacgaattaccctcctaactcaaaccagagcgggtttgatcctacgtagcagtctagtcagtattttttttacaaaaaatcggtaggccccacatgttagtctctcaccctctctatctctttcctctcccctctctctttccctaatcctctctcttcttcctcccctcacttccatctctctcggcgcccgacggggacagggcggtggtggactgctgcatctgcctggtgcggttcgaggtgaaagcggtgttgaaccgcccccctgcggccacatcttccaccgtgcctgcctcgagacatggcttgactatgaccatgccacctggccggtctaccgctcctgcctcgtcgatgttactggccgcccccttggcccggacttagtgaggggatttgattcggttcgccgacgagccgctcgcgccagctacgcgccaccgtctccggggggccttcccgtgtgggcgtaggaaatgacttctctatggtggtcgatgggggctgggcgatggagggggagttgcggttgtcggcgggggcgcaggcagttgggggcaatggagggggagttgtcgtcgtcggtaggggtgaaggcagtcggggcggcggcggaggactcgaggacggtgacaggcagatgcggaggggcgtgcaactttaggcgtcggatgggtagtcaacaaatacggctgacgggggtggggcgaaggcggtcagcgtggtggagggggaaccgtcattgtcggcgggggcggaggtagttgggacagtgaagagggagtcgaggacggcgaccgatgggggcggggcggaggtagtcggggcggccagccgccgacacgtctcttccatggcatctgataagagagagagaggggtgtgaggggaaatagatagtgacgagagagatatgaaaggtggggccattgattttttttaataaaagatttgctgactgaattgcttactggtggtttttcatccgatattgatagttgggtgaaagatgtttggttttcgggtttagggggtaatttatacccacctaaaagtttaggggcaattgcacatttgacccgttcgaaagtctaattgctattttgaccctatttttttgagtttgcttatttgacccttctttttaaaaatgaagatcgggtctgaccctaaacttggtagaaaaaaatacgtccatacccttgctcatttgagcttacattctttttttttcttttttcctgaaactcaatagtttattcaatccaacttcttgtgcaccgccggagagctaaaaagagtgattagattttaagttattatgctaatcaaatattaacagaaagatataaatctcgcatctgttgcatcgctcaaaacaagatccatttactaaccgctctctgcaaacaaagtactttgcataattgcatatacacccagaacaattaaacaagctagaaaaaaaaggtgcgaagagaaaaaatatccccaaatccaggcctacaattatctaaaaaaaatccaagcctacagcaaaactgcagaccattcttccagatcattgcttgcttcaatcaacagcggctggatcttgcgtagctccattcctccgctccaagaacggccacagccgacgctgccgcttcctccttcagcgcgccgacgccaccgctccccagcgcacggccgctgccgccgccgccgctccctacgccaccagcgacgaaagttgggactggtccgactggatgagtaggtggggattgggatggttgattaggaattgggggtattttggtctctctggggttctaaatttatttttttctagatgaagtcctaacgattgagtggaaacgagattagacggcaactttgattttgaaaagcagggtcaaataagcaaacttgaaaaaatatgatcaaattggtatttaggccttagaacaaggtcaaataagcaattgcccccaaaatttatgggtgtaatttggactttttctttttttttcttaggtagtattgtgttttatttataaattttattggaggtgaaatatcaataaatataccgggaaaaatggaagctaaaccggaagaaaaagggaaagctgaagaaatctctcgtttcttccaatctactccagtctctctattcctcatgcttatcctttttaggggtgtttagatccaccggtaaatttttttcctgtcacatggaacgtttgaacatgtatggactattaaatataaaaaaaactaattacacagtttgtgtataaattatgagaccaatcttttaaacctaatttcgtcatgatctaacaatgtgttgttacagtaaacatttgctaatgatagattaattaggcttaataaatttgtctcgcagtttacatatggagtctatatttaatactttaaatgtatatccgtatatttgatgtgcccgacaattttgttgtcccggtaaactaaacacagccttactttctccatccttaacagtggacctcgcactgcacaactctacctcaggaagccacaaatatataatactatatcttatattttcaatttacaactagtaagcgtgcacgtgcaatgcacgtaaaaccattgagctcgaaacaaaagaaattaaaacactcattggtcatatatggtattcaaatttgaaggagacaagagactttgtgatctccttcagagacatgagaaataggagaagcagcgaaggtaccaatatttgtcaaacatatagcttatgaaccagaccttatcatcagtactggctcagcctcaccagtcaccaccttcatttgatttccattgaaatacagtagtaagttaacagcaaatatatcactgtcatcaccaattcagaccatactgaagaaacatgttagcagtacttacatatttcacatgacaaagataattttacatactgaagaaactagtttagtatacagtttcttaagttgaatctgctggggggcagagtatattaagaaagattgtaggaatgtacattattccgacacacaccccgcagcagcgtcccaggcaagcaacggcctaataaacagaaaataacagcttctaaaaacccaacaacaggacagctcagaagcaactcaagttgctgtgatcaggcctgcggccatccaggtttcccaggcctaatatacagtttcttaaggaaacaggacatatttgaataacacgtcaggaacttcaaatccagaagtttgccacaatattttacacttacttgttcacatgcacagttaacagctatgaccatcctgtagcttttcaaggaacatgtataatatgtagatagtgtggaaagcacaaagatgaaaaccataggataaccttgaagagaaacctgtcaactttgtgatgatctttccttcgctgtataagaggagcagtgtaccttagaaatctgcgaatgaaaacaatgaaaataagatatcgttcttattaatatacttcagatatactttagaaatactttgaagttagaatccacatccatttgattagcagtgtatatgagagctgcatctctattctcatgaattaaaaggtagtaatttcacaaagaactggagtaacaaaataaggtattgttctaacaatattagctagacaatgtggtgcatcgccaaggggaacgaacacatgcactgttaagtatgtaattttactttaaaaactgagggttgatcttcttcagaagatggtgattatatgcaagtcattcaattggggcactaatggatgacaaaagatggtgggtacaccagaagttggcatgcttatgaaagtggttttctgaaaatcaatggtctagagatgcaatggcgtagctgtagcacacaagcaagaacctgacccaaggatccagaattcattatgtcgagagaatctagaaaaaaaaagagaaaggtggttaattggacctcttcagatgctaacaatacataatttaaattgttgggatggctagtaggagctaaccaaccaatggaattaagataggaggagccacatatttccaacccttcatttaatccaggtgaaaggtgaggagatcagcaagcgaaccctggctgcaatgttcacaatgaacgcttgtgccaactgcactagaatcgcatctctatatgagtttaaattcataggtatctccctggtgaagtataacagtgaatagcaaaacaatccttgaattttttaccattaactggcttgttgattgtacacagagaatatttgggacatctattcatatagacaaaagcaagggaaagagtggcatcgctaatgtcagagtgagaaaaagctggaaacaaaattcatgtaaataatattagcagggtttacctcagtacaatagaatgaggatacagatttacccaagaacaatttggctagccaaactacactgcaggtttgaggcttcctgcagtgtagttgaaggttcacaaatattcagttttagtggaccacaagtctacttttcatgttattagggtttagggtttagggtataaggcttagggtttagggtttagggcttagggtttagggcttagggcttaggggttagggcttaggggttagggcttagggttaggggttagggcttagggtttagggcttagggtttagggcttagggtttagggttagggcttagggtttagggcttagggtttagggttagggtttagggtttagggtttagggtttagggtttagggtttagggtttagggtttagggtttagggtttagggtttagggtttagggtttagggtttagggtttagggtttagggtttagggtttagggtttagggtttagggtttagggtttagggtttagggtttagggtttagggtttagggtttagggtttagggtttagggtttagggtttagggtttagggtttagggtttagggtttagggtttagggtttagggtttagggtttagggtttaggnnnnnnnnnnnnnnnnnnnnnnnnnnnnnnnnnnnnnnnnnnnnnnnnnnnnnnnnnnnnnnnnnnnnnnnnnnnnnnnnnnnnnnnnnnnnnnnnnnnnnnnnnnnnnnnnnnnnnnnnnnnnnnnnnnnnnnnnnnnnnnnnnnnnnnnnnnnnnnnnnnnnnnnnnnnnnnnnnnnnnnnnnnnnnnnnnnnnnnnnnnnnnnnnnnnnnnnnnnnnnnnnnnnnnnnnnnnnnnnnnnnnnnnnnnnnnnnnnnnnnnnnnnnnnnnnnnnnnnnnnnnnnnnnnnnnnnnnnnnnnnnnnnnnnnnnnnnnnnnnnnnnnnnnnnnnnnnnnnnnnnnnnnnnnnnnnnnnnnnnnnnnnnnnnnnnnnnnnnnnnnnnnnnnnnnnnnnnnnnnnnnnnnnnnnnnnnnnnnnnnnnnnnnnnnnnnnnnnnnnnnnnnnnnnnnnnnnnnnnnnnnnnnnnnnnnnnnnnnnnnnnnnnnnnnnnnnnnnnnnnnnnnnnnnnnnnnnnnnnnnnnnnnnnnnnnnnnnnnnnnnnnnnnnnnnnnnnnnnnnnnnnnnnnnnnnnnnnnnnnnnnnnnnnnnnnnnnnnnnnnnnnnnnnnnnnnnnnnnnnnnnnnnnnnnnnnnnnnnnnnnnnnnnnnnnnnnnnnnnnnnnnnnnnnnnnnnnnnnnnnnnnnnnnnnnnnnnnnnnnnnnnnnnnnnnnnnnnnnnnnnnnnnnnnnnnnnnnnnnnnnnnnnnnnnnnnnnnnnnnnnnnnnnnnnnnnnnnnnnnnnnnnnnnnnnnnnnnnnnnnnnnnnnnnnnnnnnnnnnnnnnnnnnnnnnnnnnnnnnnnnnnnnnnnnnnnnnnnnnnnnnnnnnnnnnnnnnnnnnnnnnnnnnnnnnnnnnnnnnnnnnnnnnnnnnnnnnnnnnnnnnnnnnnnnnnnnnnnnnnnnnnnnnnnnnnnnnnnnnnnnnnnnnnnnnnnnnnnnnnnnnnnnnnnnnnnnnnnnnn

SEQ ID NO: 31 - protein, 2033 aa, Oryza sativa
MPLFMSEEELRLLGGDVAAVAERADAAIRELRQQVDTVRAEADAAAIAAEQTCALLEQRYDTLSAEADRFRAELAELAAASERRAADLASSQSEIHQLRIQAIAKDGEIERLKVEISEVHKSKSQSLELIEQRDAEIREKDGIIQNYLDKIVNLADSSASKGARIQEVEAKFTHLQATCNRITQEKDLLEKHNLWLDEELKEKVKNLAELRKSNMDEEARMSAKVAELERETSESSSSLRRSKERVSELEQRVSYMEKELCSTKDAAAANEQRLAAELSTVMKLAELHKESSEEWSKKAGELEGVIKALETHLTQVEDEYKEKLEKETSAKRDLEMEATYLKQKLEKCESDLENTRKSSELSFTPLVAADPCDLAGSPMKEMAFSDPANQNDLMIVPKVPTGVSGTALAASLLRDGWSLAKIYEKYQEATDALRHERFGRRHAEAVLERVLHEIEEKAELILDERAEHRRMVEAYALMDQKLQQALLEHDNFENTIRNLKSELKRRERDHSIAQKEIDDLQKQIAVLLKECQDIQLRCGSSLPNVGDGALSTSTSTGVPEVENNIHEHMTFNDINGLVQQNVQLRNQVHLLSADLDKRDMELRESFQIELKKITDDAASRVEKVMKKSEEQAIMIESLHRSVAMYRKLCEEQQKSRSNVEHIPKNLEDDGRKDLMVLFEGSQEVSRKAYEQVSERAKSLDEELTKLRTELLSLRSERDKAVLEAEFARERLNGFTAELEHQRKEANSISLRNAELMHLVVDYEKRLRENSESMKAVEENSRKLLMEMSILKNEKEILAKSEKKALEEVHDLTTRVHRLQATIDTIHATEEVQENARSIERRNQEEYIKRLERDWAEVKKELQEQRDHVRVLTLDKKNAFDGCLKQVEDMRKELQNSWKAATDAESRAAVAEAKCSDLETKLKSRKTIFRDGGRDILSATEENDELFQLKEELEKYKEEAQANKSYMLQYKEIANSNESALKQMESALQDFKTESETIKKSLEDEITKLRTKISELEKCYIMKCEEAASAIEAKEKDTTSLMKEISVLRNEVSEKVIQIEKLETELASSKRALDEQYKRWRSAQDNYERQVILQSETIQELTSASKELSSLQQEIIVLRQTVETQKAENDGLRTLGEQEKIELVKGKDEALQKYNELNDQNKILHNQLEALHIRLAEKERNIAGLSSQRIDSHGEDDLHSVIGYLRRSKEIAETEISLLKQEKSRLQIELESALKSTKEAQDLLRSQTDSARTSMLKDEEFKSLQFQVRELNLLRESNIQLREENKHNFEECQKFHDEAQKAKMEAERLHNLLLEKQVDAEICKKEIEMQKTEIANLNQKISELVENSRGVDLSTYETMKDELQNIKATLRENSAELERTKKLLSEKDSVIRNLEEKLAGCQSELDAREKKLNDVEASLKSEIDRHRKININIKRKLDASAKEKEELTKEKQSLSKQLEDLKSSQKTTTENSNEQAIKEKDFRIQTLEKVLEKERDDNKKEKAFRRRNEKVFTTAIQNMNQERKQVEESIEKHRQAVKEVIEHYTGISSQIPSGSAIDEQLRSYFLAIKAVEESPSPFQDGAASQTPSVESADVDASAATAGRQVATPPRPAQVKVVEERAVSTLPKPSTEVRRPGGRRPLVRPSLERVEEPQADIDTTVVEGSTEKGGLLMERETPGGVSALQPSSRKRLIPSPQTRDDASQGETTDANPPLKKPKEGSSQCTSELKTEQSPHEDVMAPVPVLPSTELDEQQPGEEMDTDQSSLPVEEVEETREDDLGDKDDMETHIDASMDIQGQDAETGIDNDATTVEDVPVKSEAVMESLEEDLKTEDGKEEGQFTATTDVEDEREEGELPDEPEQPDSTPPVLDVGEQAGDSFRAASPAGPTEKSDVDMPEETGEGDGTMESDQSPVPQSGGADASPSQMADASPSPAREPSPNPVQAGAPPEQQNPTPPNPVQAGASSEQQNPATAAEGVETRSTRTINLTERARQNRQARILRSATQQNARGRGNQSLTYRKDGGRGTRGRGGRGQS
